(19) United States
(12) Patent Application Publication
(10) Pub. No.: US 2025/0215081 A1
(43) Pub. Date: Jul. 3, 2025

(54) ANTI-CD19 AGENT AND B CELL TARGETING AGENT COMBINATION THERAPY FOR TREATING B CELL MALIGNANCIES

(71) Applicant: NOVARTIS AG, Basel (CH)

(72) Inventors: Kimberly Marie AARDALEN, Norwell, MA (US); Regis CEBE, Saint-Louis (FR); Dattananda CHELUR, Chesterbrook, PA (US); Glenn DRANOFF, Concord, MA (US); Brian Walter GRANDA, Salisbury, MA (US); Nadia HASSOUNAH, Boston, MA (US); Connie HONG, Somerville, MA (US); Sunyoung JANG, Cambridge, MA (US); Haihui LU, Winchester, MA (US); Amy RAYO, Cambridge, MA (US); Darko SKEGRO, Riehen (CH); Janghee WOO, Short Hills, NJ (US)

(21) Appl. No.: 18/035,472

(22) PCT Filed: Nov. 4, 2021
(86) PCT No.: PCT/IB2021/060216

§ 371 Date: May 4, 2023

Related U.S. Application Data
(60) Provisional application No. 63/110,490, filed on Nov. 6, 2020.
(60) Provisional application No. 63/110,501, filed on Nov. 6, 2020.
(60) Provisional application No. 63/114,370, filed on Nov. 16, 2020.
(60) Provisional application No. 63/114,371, filed on Nov. 16, 2020.
(60) Provisional application No. 63/147,488, filed on Feb. 9, 2021.
(60) Provisional application No. 63/147,501, filed on Feb. 9, 2021.

(51) Int. Cl. C07K 16/28; A61K 39/00; A61P 35/00

(52) U.S. Cl. CPC C07K 16/2809; A61P 35/00; C07K 16/2803; C07K 16/2824; A61K 2039/505; C07K 2317/24; C07K 2317/31; C07K 2317/52; C07K 2317/569; C07K 2317/92

(57) ABSTRACT

The present disclosure provides combinations of anti-CD19 agents and B cell targeting agents and methods of treating subjects having B cell malignancies with combinations of anti-CD19 agents and a B cell targeting agents.

### 1. CROSS-REFERENCE TO RELATED APPLICATIONS

[0001] This application claims the priority benefit of U.S. provisional application nos. 63/110,501, filed Nov. 6, 2020, 63/114,370, filed Nov. 16, 2020, 63/114,371, filed Nov. 16, 2020, 63/147,488, filed Feb. 9, 2021, 63/147,501, filed Feb. 9, 2021, and 63/110,490, filed Nov. 6, 2020, the contents of each of which are incorporated herein in their entireties by reference thereto.

### 2. SEQUENCE LISTING

[0002] The instant application contains a Sequence Listing which has been submitted electronically in ASCII format and is hereby incorporated by reference in its entirety. Said ASCII copy, created on Nov. 4, 2021, is named NOV-013WO_SL.txt and is 704,029 bytes in size.

### 3. FIELD OF INVENTION

[0003] The disclosure generally relates to combinations of anti-CD19 agents and B cell targeting agents, and their use for treating B cell malignancies.

### 4. BACKGROUND

[0004] B cells express a wide array of cell surface molecules during their differentiation and proliferation. CD19 is a pan-B cell membrane glycoprotein that is expressed from early stages of pre-B cell development through terminal differentiation, regulating B lymphocyte development and function. Expression of CD19 was identified on the vast majority of Non-Hodgkin lymphoma (NHL) and on leukemias, including Chronic Lymphocytic Leukemia (CLL), Acute Lymphoblastic Leukemia (ALL) and Waldenstrom's Macroglobulinemia (WM).

[0005] A few anti-CD19 agents are approved for treating B cell malignancies, for example, blinatumomab (marketed by Amgen as BLINCYTO®), which is a CD19-CD3 bispecific T cell engager that is approved for the treatment of the treatment of ALL, tisagenlecleucel (marketed by Novartis as KYMRIAH®), which is a chimeric antigen receptor (CAR) T cell composition that is approved for the treatment of ALL, axicabtagene ciloleucel (marketed by Gilead as Gilead as YESCARTA®), which is a CAR T cell composition approved for diffuse large B-cell lymphoma (DLBCL), and brexucabtagene autoleucel (marketed by Gilead as TECARTUS®), which is a CAR T cell composition approved for mantle cell lymphoma (MCL). However, some patients treated with blinatumomab and CD19-specific CAR T therapy develop cytokine release syndrome (CRS). Teachey et al., 2013, Blood, 121(26): 5154-5157; Park et al., 2018, Clin Infect Dis. 2018 Aug. 15; 67(4): 533-540. CRS is a systemic inflammatory response that can produce symptoms ranging from mild, flu-like symptoms, to severe life-threatening inflammatory responses. Shimabukuro-Vornhagen et al., 2018, J Immunother Cancer. 6:56.

[0006] Despite major improvements in cancer therapy, B cell malignancies such as the B cell subtypes of non-Hodgkin's lymphomas, and chronic lymphocytic leukemia, are major contributors of cancer-related deaths. Accordingly, there is still a need for further therapeutic agents and methods for the treatment of B cell malignancies and management of CRS associated with anti-CD19 agents.

### 5. SUMMARY

[0007] The disclosure provides combinations of anti-CD19 agents and B cell targeting agents and methods of using such combinations for treating B cell malignancies. Without being bound by theory, it is believed that CRS associated with anti-CD19 agents can be mitigated by depleting normal B cells with a B cell targeting agent. Again without being bound by theory, it is believed that the therapeutic efficacy of an anti-CD19 agent can be enhanced when administered in combination with a B cell targeting agent.

[0008] Accordingly, in one aspect, the disclosure provides a method of treating a subject having a B cell malignancy, by administering an anti-CD19 agent and a B cell targeting agent to the subject. In some embodiments, the B cell targeting agent is administered prior to administration of the anti-CD19 agent. Without being bound by theory, it is believed that cytokine release by normal B cells is an important driver in CRS, and it is believed that depleting normal B cells in a subject with a B cell targeting agent prior to administering an anti-CD19 agent to the subject can reduce the severity of CRS experienced by the subject.

[0009] In another aspect, the disclosure provides combinations of anti-CD19 agents and B cell targeting agents. Such combinations can be used, for example, in methods of treating a subject having a B cell malignancy (e.g., a NHL such as DLBCL or MCL). In some embodiments, the subject has a NHL, for example DLBCL or MCL, and (i) has failed at least one prior line (and optionally up to five prior lines) of standard of care therapy, e.g., an anti-CD20 therapy such as rituximab and/or (ii) is intolerant to or ineligible for one or more other approved therapies, e.g., autologous stem cell transplant (ASCT) and/or (iii) is a non-responder to a chimeric antigen receptor (CAR) T cell therapy. The NHL can be relapsed and/or refractory.

[0010] In further aspects, the disclosure provides anti-CD19 agents for use in combination with B cell targeting agents and B cell targeting agents for use in combination with anti-CD19 agents, for example, for use in treating a subject having a B cell malignancy (e.g., a NHL such as DLBCL or MCL). In some embodiments, the subject has a NHL, for example DLBCL or MCL, and (i) has failed at least one prior line (and optionally up to five prior lines) of standard of care therapy, e.g., an anti-CD20 therapy such as rituximab and/or (ii) is intolerant to or ineligible for one or more other approved therapies, e.g., autologous stem cell transplant (ASCT) and/or (iii) is a non-responder to a chimeric antigen receptor (CAR) T cell therapy. The NHL can be relapsed and/or refractory.

[0011] The anti-CD19 agents used in the methods and combinations of the disclosure can be CD19 binding molecules that specifically bind to human CD19, e.g., antibodies, antigen-binding fragments thereof, and multispecific molecules that specifically bind to human CD19. Alternatively, the anti-CD19 agent can be a population of cells that expresses a chimeric antigen receptor (“CAR”) molecule that binds CD19.

[0012] In some aspects, the CD19 binding molecules are monospecific CD19 binding molecules (e.g., antibodies and antigen-binding fragments thereof) comprising a CD19 antigen-binding domain or antigen-binding module (“ABM”). Exemplary CD19 binding molecules, which can be monospecific, are described in Section 7.2 and specific embodiments 2 to 39, infra.

[0013] In other aspects, the CD19 binding molecules are multispecific binding molecules (“MBMs”) comprising a CD19 ABM. In certain embodiments, the MBMs are bispecific binding molecules (“BBMs”). The BBMs comprise a first ABM that specifically binds to human CD19 (“ABM1” or “CD19 ABM”) and a second ABM that specifically binds to a second antigen (“ABM2”), e.g., human CD3 or other component of a T cell receptor (TCR) complex (sometimes referred to herein as a “TCR ABM”). The terms ABM1, ABM2, CD19 ABM, and TCR ABM are used merely for convenience and are not intended to convey any particular configuration of a BBM. In some embodiments, a TCR ABM binds to CD3 (referred to herein a “CD3 ABM” or the like). Accordingly, disclosures relating to ABM2 and TCR ABMs are also applicable to CD3 ABMs. Such multispecific molecules can be used to direct CD3+ effector T cells to CD19+ sites, thereby allowing the CD3+ effector T cells to attack and lyse CD19+ cells and tumors.

[0014] In other embodiments, the MBMs are trispecific binding molecules (“TBMs”) that engage CD19, CD3 or other component of a TCR complex on T-cells, and either CD2 or a human tumor-associated antigen (“TAA”), for example a B cell antigen other than CD19. The TBMs comprise at least three antigen-binding modules (“ABMs”) that can bind (i) CD19 (ABM1), (ii) a component of a TCR complex (ABM2), and (iii) either CD2 or a TAA (ABM3). TBMs that bind to (1) human CD19, (2) CD3 or other component of a TCR complex, and (3) CD2 are referred to herein as “Type 1 TBMs” for convenience. TBMs that bind to (1) human CD19, (2) CD3 or other component of a TCR complex, and (3) a TAA are referred to herein as “Type 2 TBMs” for convenience.

[0015] Without being bound by theory, the inventors believe that combining CD2− and TCR complex-engagement in a Type 1 TBM can stimulate both a primary signaling pathway that promotes T-cell mediated lysis of tumor cells (by clustering TCRs, for example) and a second co-stimulatory pathway to induce T-cell proliferation and potentially overcome anergy. Also without being bound by theory, it is believed that engaging a TAA in addition to CD19 and a component of a TCR complex a Type 2 TBM will improve the clinical outcomes of RTCC therapy of B cell malignancies by targeting a greater number of cancerous B cells than using bispecific engagers that target only a CD19 and a TCR complex component.

[0016] Accordingly, in some embodiments, the CD19 binding molecules used in the methods and combinations of the disclosure are Type 1 TBMs that bind to (1) human CD19, (2) CD3 or other component of a TCR complex, and (3) CD2.

[0017] In other embodiments, the CD19 binding molecules used in the methods and combinations of the disclosure are Type 2 TBMs that bind to (1) human CD19, (2) CD3 or other component of a TCR complex, and (3) a TAA.

[0018] Unless expressly indicated otherwise or unless the context dictates otherwise, a reference to TBMs in the present disclosure applies to both Type 1 and Type 2 TBMs.

[0019] Features of exemplary MBMs are described in Section 7.2 and specific embodiments 40 to 605, infra.

[0020] Further exemplary CD19 binding molecules that can be used in the methods and combinations of the disclosure are described in Section 7.2 and specific embodiments 614 to 626, infra.

[0021] In some aspects, the anti-CD19 agents used in the methods and combinations of the disclosure are populations of cells that express CAR molecules that bind CD19. Features of exemplary CARs and populations of cells that express CAR molecules are described in Section 7.3 and specific embodiments 627 to 700, infra.

[0022] In some aspects, the B cell targeting agent is a B-cell activating factor receptor (BAFFR) binding molecule, a CD20 binding molecule, a CD22 binding molecule, or a B-cell activating factor (BAFF) binding molecule. Exemplary features of B cell targeting agents are described in Section 7.4 and specific embodiments 701 to 741, infra.

[0023] Exemplary B cell malignancies and patient populations suitable for treatment using the methods and compositions described herein are described in Section 7.6 and specific embodiments 760 to 807, infra.

[0024] The anti-CD19 agents described throughout can be administered to a subject as a combination treatment. For example, the combination can comprise an anti-CD19 agent and a B cell targeting agent. The anti-CD19 agent, in some embodiments can be a CD19 binding molecule.

[0025] In some embodiments (e.g., as used in a combination), the CD19 binding molecule can comprise a CDR-H1, a CDR-H2, and a CDR-H3 having the amino acid sequences of SEQ ID NO:1, SEQ ID NO:2, and SEQ ID NO:3, and a CDR-L1, a CDR-L2, and a CDR-L3 having the amino acid sequences of SEQ ID NO:14, SEQ ID NO:15, and SEQ ID NO:16. In other embodiments, the CD19 binding molecule can comprise a CDR-H1, a CDR-H2, and a CDR-H3 having the amino acid sequences of SEQ ID NO:4, SEQ ID NO:5, and SEQ ID NO:6, and a CDR-L1, a CDR-L2, and a CDR-L3 having the amino acid sequences of SEQ ID NO:17, SEQ ID NO:18, and SEQ ID NO:19. The CD19 binding molecule can also comprise a CDR-H1, a CDR-H2, and a CDR-H3 having the amino acid sequences of SEQ ID NO:7, SEQ ID NO:8, and SEQ ID NO:9, and a CDR-L1, a CDR-L2, and a CDR-L3 having the amino acid sequences of SEQ ID NO:20, SEQ ID NO:21, and SEQ ID NO:22. In certain embodiments, the CD19 binding can comprise a CDR-H1, a CDR-H2, and a CDR-H3 having the amino acid sequences of SEQ ID NO:10, SEQ ID NO:11, and SEQ ID NO:12, and a CDR-L1, a CDR-L2, and a CDR-L3 having the amino acid sequences of SEQ ID NO:23, SEQ ID NO:24, and SEQ ID NO:25.

[0026] The CD19 binding molecule can comprise a VH having the amino acid sequence of SEQ ID NO:13. The CD19 binding molecule can also comprise a VL having the amino acid sequence of SEQ ID NO:26. The CD19 binding molecule can also comprise both a VH having the amino acid sequence of SEQ ID NO:13 and a VL having the amino acid sequence of SEQ ID NO:26.

[0027] The CD19 binding molecule can also be a multispecific binding molecule (MBM). For example, the CD19 binding molecule can comprise (a) an antigen-binding module 1 (ABM1) that binds specifically to CD19; and (b) an antigen-binding module 2 (ABM2) that binds specifically to a different target molecule (e.g., a component of a human T-cell receptor (TCR) complex (such as CD3)). The CD19 binding molecule can be a trispecific binding molecule (TBM) that comprises an antigen-binding module 3 (ABM3) that binds specifically to a target molecule other than CD19. For example, if the CD19 binding molecule is a TBM, then in some examples, the ABM2 can bind specifically to a component of a human T-cell receptor (TCR) complex and ABM3 can bind specifically to human CD2.

[0028] The CD19 binding molecule in some embodiments can be trivalent. The CD19 binding molecule can be configured in one of multiple ways, for example, as any one of the configurations depicted in FIGS. 2A-2P. For example, the CD19 binding molecule can have the configuration as depicted in FIG. 21. The CD19 binding molecule can also have the configuration referred to as T2 in Section 7.2.4.1.

[0029] The CD19 binding molecule can have an ABM3 that binds specifically to human CD2. In some embodiments, the ABM3 is a non-immunoglobulin scaffold based ABM. In some embodiments, the ABM3 can comprise a receptor binding domain of a CD2 ligand. In some embodiments, the ABM3 is a CD58 moiety. The CD58 moiety used can comprise the amino acid sequence of CD58-6 as set forth in Table 12.

[0030] The CD19 binding molecule can also comprise unique Fc domains. For examples, the CD19 binding molecule can comprise a first variant Fc region and a second variant Fc region forming an Fc domain. The first variant Fc region and the second variant Fc region can together form an Fc heterodimer. In some embodiments, the first and second variant Fc regions can comprise the amino acid substitutions amino acid substitutions T366W: T366S/L368A/Y407V. In some embodiments, the Fc domain is an Fc heterodimer that comprises knob-in-hole (“KIH”) modifications. In some embodiments, the Fc domain has altered effector function. In some embodiments, the Fc domain can have altered binding to one or more Fc receptors. Some mutations of the Fc domain can be a silencing mutation. For example, one or more of the mutations can lead to a silent IgG1. In some embodiments, the mutation can comprising a D265A mutation. In other embodiments, the mutations can comprise D265A and P329A mutations. In some embodiments, the Fc domain of the CD19 binding molecule is a human IgG1 Fc domain which comprises: (a) a first CH3 domain comprising the modification T366W; and (b) a second CH3 domain that heterodimerizes with the first CH3 domain and comprises the modifications T366S, L368A and Y407V. In some embodiments, the the Fc domain of the CD19 binding molecule comprises a human IgG1 Fc domain modified by substituting the aspartate residue at position 265 with an alanine residue, the asparagine residue at position 297 with an alanine residue and the proline residue at position 329 with an alanine residue (D265A/N297A/P329A).

[0031] In some specific embodiments, the CD19 binding molecule is a trispecific binding molecule (TBM) that comprises (a) an antigen-binding module 1 (ABM1) that binds specifically to CD19 and comprises CDR-H1, CDR-H2, and CDR-H3 having the amino acid sequences of SEQ ID NO:4, SEQ ID NO:5, and SEQ ID NO:6, and CDR-L1, CDR-L2, and CDR-L3 having the amino acid sequences of SEQ ID NO:17, SEQ ID NO:18, and SEQ ID NO:19; (b) an antigen-binding module 2 (ABM2) that binds specifically to a component of a human T-cell receptor (TCR) complex; and (c) an antigen-binding module 3 (ABM3) that binds specifically to human CD2. This CD19 binding molecule can be trivalent. The ABM1 can be a Fab. The CD19 binding molecule can also have an ABM1 that comprises a VH having the amino acid sequence of SEQ ID NO:13 and a VL having the amino acid sequence of SEQ ID NO:26.

[0032] The CD19 binding molecule can have a component of the TCR complex that binds to CD3. The CD19 binding molecule's ABM2 can be an anti-CD3 antibody or an antigen-binding domain thereof. For example, the ABM2 can comprise the CDR sequences of CD3hi. The heavy chain sequences of CD3hi can be as set forth in Table 9A. In some embodiments, the anti-CD3 antibody or antigen-binding domain thereof is in the form of an scFv. For example, the ABM2 can comprise the amino acid sequence of the scFv designated as CD3hi in Table 9A. The CD19 binding molecule can comprise an ABM3 that is a CD58 moiety. As an example, the CD58 moiety can be an amino acid sequence of CD58-6 as set forth in Table 12. The CD19 binding molecule used in the combinations and/or disclosed throughout can also comprise an Fc domain. In the Fc domain, the first variant Fc region and a second variant Fc region can together form an Fc heterodimer.

[0033] In a specific embodiment, the CD19 binding molecule is a trispecific binding molecule (TBM) comprising (a) an antigen-binding module 1 (ABM1) that binds specifically to CD19 and which is a Fab comprising CDR-H1, CDR-H2, and CDR-H3 having the amino acid sequences of SEQ ID NO:4, SEQ ID NO:5, and SEQ ID NO:6, and CDR-L1, CDR-L2, and CDR-L3 having the amino acid sequences of SEQ ID NO:17, SEQ ID NO:18, and SEQ ID NO:19; (b) an antigen-binding module 2 (ABM2) that binds specifically to CD3 and which comprises the amino acid sequence of the scFv designated as CD3hi in Table 9A; (c) an antigen-binding module 3 (ABM3) that binds specifically to human CD2 and which comprises the amino acid sequence of CD58-6 as set forth in Table 12; and (d) an Fc domain.

[0034] In a specific embodiment, the CD19 binding molecule is a trispecific binding molecule (TBM) comprising (a) an antigen-binding module 1 (ABM1) that binds specifically to CD19 and which is a Fab comprising a CDR-H1, a CDR-H2, and a CDR-H3 having the amino acid sequences of SEQ ID NO:30, SEQ ID NO:31, and SEQ ID NO:32, and a CDR-L1, a CDR-L2, and a CDR-L3 having the amino acid sequences of SEQ ID NO:43, SEQ ID NO:44, and SEQ ID NO:45; (b) an antigen-binding module 2 (ABM2) that binds specifically to CD3 and which comprises the amino acid sequence of the scFv designated as CD3hi in Table 9A; (c) an antigen-binding module 3 (ABM3) that binds specifically to human CD2 and which comprises the amino acid sequence of CD58-6 as set forth in Table 12; and (d) an Fc domain.

[0035] In another specific embodiment, the CD19 binding molecule is a trispecific binding molecule (TBM) comprising (a) an antigen-binding module 1 (ABM1) that binds specifically to CD19 and which is a Fab comprising: (i) CDR-H1, CDR-H2, and CDR-H3 having the amino acid sequences of SEQ ID NO:4, SEQ ID NO:5, and SEQ ID NO:6, and CDR-L1, CDR-L2, and CDR-L3 having the amino acid sequences of SEQ ID NO:17, SEQ ID NO:18, and SEQ ID NO:19; (b) an antigen-binding module 2 (ABM2) that binds specifically to CD3 and which comprises the amino acid sequence of the scFv designated as CD3hi in Table 9A; (c) an antigen-binding module 3 (ABM3) that binds specifically to human CD2 and which comprises the amino acid sequence of CD58-6 as set forth in Table 12; and (d) an Fc domain. The ABM1 of the CD19 binding molecule can comprise a CDR-H1, a CDR-H2, and a CDR-H3 having the amino acid sequences of SEQ ID NO:4, SEQ ID NO:5, and SEQ ID NO:6, and a CDR-L1, a CDR-L2, and a CDR-L3 having the amino acid sequences of SEQ ID NO:17, SEQ ID NO:18, and SEQ ID NO:19. In some embodiments, ABM1 can comprise a VH having the amino acid sequence of SEQ ID NO:13 and a VL having the amino acid sequence of SEQ ID NO:26.

[0036] In another specific embodiment, the CD19 binding molecule comprises a first half antibody comprising (a) an antigen-binding module 1 (ABM1) that binds specifically to CD19; (b) an antigen-binding module 2 (ABM2) that binds specifically to CD3 and which comprises an scFv; (c) an Fc region; and a second half antibody comprising an antigen-binding module 3 (ABM3) that binds specifically to human CD2 and which comprises a CD58 IgV domain and (d) an Fc region, where the Fc region in the first half antibody and the Fc region in the second half antibody form a Fc heterodimer. The CD19 binding molecule can comprise a first half antibody which comprises a heavy chain comprising the amino acid sequence of SEQ ID NO:63; and a light chain comprising the amino acid sequence of SEQ ID NO:64; and a second half antibody comprising the amino acid sequence of SEQ ID NO:65. The CD19 binding molecule used in the combination and/or as disclosed throughout can comprise a first half antibody which comprises a heavy chain comprising the amino acid sequence of SEQ ID NO:74; and a light chain comprising the amino acid sequence of SEQ ID NO:64; and a second half antibody comprising the amino acid sequence of SEQ ID NO:75 or SEQ ID NO:86. In some embodiments, the CD19 binding molecule used in the combination and/or as disclosed throughout can comprise a first half antibody which comprises a heavy chain comprising the amino acid sequence of SEQ ID NO:74; and a light chain comprising the amino acid sequence of SEQ ID NO:64; and a second half antibody comprising the amino acid sequence of SEQ ID NO:86.

[0037] In one embodiment, the CD19 binding molecule comprises (a) first half antibody heavy chain whose amino acid sequence comprises the amino acid sequence of SEQ ID NO:63 and a Fc sequence; (b) a first half antibody light chain whose amino acid sequence comprises the amino acid sequence of SEQ ID NO:64; (c) a second half antibody whose amino acid sequence comprises the amino acid sequence of SEQ ID NO:65 and a Fc sequence.

[0038] In another embodiment, the CD19 binding molecule can comprise (a) a first polypeptide whose amino acid sequence comprises the amino acid sequence of SEQ ID NO:74; (b) a second polypeptide whose amino acid sequence comprises the amino acid sequence of SEQ ID NO:64; and (c) a third polypeptide whose amino acid sequence comprises the amino acid sequence of SEQ ID NO:75 or SEQ ID NO:86.

[0039] In some embodiments, the CD19 binding molecule can comprise (a) a first polypeptide whose amino acid sequence comprises the amino acid sequence of SEQ ID NO:74; (b) a second polypeptide whose amino acid sequence comprises the amino acid sequence of SEQ ID NO:64; and (c) a third polypeptide whose amino acid sequence comprises the amino acid sequence of SEQ ID NO:86.

[0040] As described throughout, the combination can comprise an anti-CD19 agent and a B cell targeting agent. In some embodiments, the B cell targeting agent is a B cell depleting agent. In some embodiments, the B cell targeting agent is a BAFF receptor (BAFFR) binding molecule. For example, the BAFFR binding molecule is an antibody or antigen-binding domain thereof. In this embodiment, the BAFFR binding molecule can comprise a CDR-H1, a CDR-H2, a CDR-H3 having the amino acid sequences of ianalumab set forth in Table 18, and a CDR-L1, a CDR-L2, and a CDR-L3 having the amino acid sequences of ianalumab set forth in Table 18. The BAFFR binding molecule can comprise a heavy chain variable region (VH) and a light chain variable region (VL) having the VH and VL sequences of ianalumab set forth in Table 18. In a specific example, the BAFFR binding molecule is ianalumab.

[0041] The anti-CD19 agent and the B cell targeting agent can be separate molecules. In some embodiments, the anti-CD19 agent and the B cell targeting agent can be formulated in separate pharmaceutical compositions.

[0042] Provided herein is also a combination comprising an anti-CD19 agent as described herein and a B cell targeting agent as described herein for use in treating a subject having a B cell malignancy. The combination described throughout can be used in a method for treating a subject having a B cell malignancy. The method can comprise administering the anti-CD19 agent and a B cell targeting agent as described throughout. Regarding timing of administration, the B cell targeting agent can be administered to the subject one or more times prior to administering the anti-CD19 agent to the subject for the first time. The method of administration can also comprise simultaneously administering the anti-CD19 agent and the B cell targeting agent. In some embodiments, the B cell malignancy is diffuse large B-cell lymphoma (DLBCL). For example, the B cell malignancy can be relapsed and/or refractory diffuse large B-cell lymphoma (DLBCL). In some embodiments, the B cell malignancy can be acute lymphoblastic leukemia (ALL). For example, the B cell malignancy can be relapsed and/or refractory ALL. The combination of anti-CD19 agent and the B cell targeting agent can comprise further therapeutic agents as described herein.

### 6. BRIEF DESCRIPTION OF THE FIGURES

[0043] FIGS. 1A-1AH: Exemplary BBM configurations. FIG. 1A illustrates components of the exemplary BBM configurations illustrated in FIGS. 1B-1AH. Not all regions connecting the different domains of each chain are illustrated (e.g., the linker connecting the VH and VL domains of an scFv, the hinge connecting the CH2 and CH3 domains of an Fc domain, etc., are omitted). FIGS. 1B-1F illustrate bivalent BBMs; FIGS. 1G-1Z illustrate trivalent BBMs; FIGS. 1AA-1AH illustrate tetravalent BBMs.

[0044] FIGS. 2A-2V: Exemplary TBM configurations. FIG. 2A illustrates components of the exemplary TBM configurations illustrated in FIGS. 2B-2V. Not all regions connecting the different domains of each chain are illustrated (e.g., the linker connecting the VH and VL domains of an scFv, the hinge connecting the CH2 and CH3 domains of an Fc, etc., are omitted). FIG. 2B-2P illustrates trivalent TBMs; FIGS. 2Q-2S illustrate tetravalent TBMs; FIG. 2T illustrates a pentavalent TBM, and FIGS. 2U-2V illustrate hexavalent TBMs.

[0045] FIGS. 3A-3C: Schematics of the bispecific (FIG. 3A and FIG. 3C) and trispecific (FIG. 3B) constructs of Example 1.

[0046] FIGS. 4A-4B: Ability of CD19 BBMs to elicit redirected T-cell cytotoxic activity (RTCC) against CD19+ target cells. Both NEG258-based and NEG218-based BBMs mediated RTCC activity against CD19+ target cell lines. Nalm6-luc (FIG. 4A) and Karpas422-luc (FIG. 4B) cells were co-cultured with expanded T cells in the presence of serial diluted BBMs at an effector cell: target cell (E:T) ratio of 3:1. Luminescence signal was measured after 24h of incubation.

[0047] FIGS. 5A-5B: Ability of CD19 BBMs to elicit T-cell proliferation. Both NEG258-based and NEG218-based BBMs induced T cell proliferation. Karpas422-luc (FIG. 5A) and Nalm6-luc (FIG. 5B) cells were co-cultured with expanded T cells in the presence of serial diluted BBMs at an E:T ratio of 1:1. Luminescence signal was measured after 96h of incubation.

[0048] FIGS. 6A-6F: Ability of CD19 TBMs to elicit CD2 dependent T cell activation. CD2 knock out attenuated advantage of trispecific constructs. FIGS. 6A-6B show representative flow cytometry analysis of CD2 expression on JNL CD2 WT (FIG. 6A) and KO (FIG. 6B) cells. Staining by the anti-CD2 mAb (dot filled histogram) is overlaid with that of the mIgG1 isotype control (diagonal line filled histogram) or unstained (open histogram). FIGS. 6C-6F show data for JNL CD2+(FIG. 6C-6D) and CD2− (FIG. 6E-6F) cells co-cultured with CD19+ target cells in the presence of serial diluted BBMs and TBMs at an E:T ratio of 3:1. Luminescence signal was measured after 24h of incubation.

[0049] FIGS. 7A-7B: Binding of CD19 TBMs to cyno B cells. FIG. 7A shows data for a TBM with a NEG218-based CD19 binding arm and FIG. 7B shows data for a TBM with a NEG258-based CD19 binding arm.

[0050] FIGS. 8A-8H: Ability of CD19 TBMs to induce T cell activation upon cyno B cell depletion in PBMCs. In FIG. 8A, PBMCs were isolated from cyno monkey whole blood using ficoll gradient centrifugation and were incubated with bi or trispecific constructs for overnight. Samples were harvested and simultaneously stained for CD3 and CD20 to identify B and T cells within the PBMC population. Percentage of B cell depletion was calculated as described in Section 8.6.1. FIGS. 8B-8H show the results of FACS analysis of CD69 and CD25 expression on CD3⁺ T cells to determine single (CD69⁺CD25⁻ or CD69⁻CD25⁺) or double-positive cells (CD69⁺CD25⁺). FIG. 8B: untreated (media only); FIGS. 8C-8E: CD3hi TSP1L; FIGS. 8F-8H: CD3hi TSP1.

[0051] FIGS. 9A-9P: Ability of NEG258- and NEG218-based TBMs to induce redirected T cell cytotoxicity by human donor cells against Nalm6 (FIGS. 9A-9H) and Karpas422 (FIGS. 9I-9P) target cells.

[0052] FIGS. 10A-10P: Ability of NEG258- and NEG218-based TBMs with different CD3 affinities to induce redirected T cell cytotoxicity by human donor cells against Nalm6 (FIGS. 10A-10H) and Karpas422 (FIGS. 10I-10P) target cells.

[0053] FIGS. 11A-11L: Ability of NEG258-based TBMs that include a CD2-binding arm and those that include a control lysozyme binding arm to induce redirected T cell cytotoxicity by human donor cells against Nalm6 (FIGS. 11A-11H) and Karpas422 (FIGS. 11I-11L) target cells.

[0054] FIGS. 12A-12C: Induction of T cell cytokine release by NEG258- and NEG218-based TBMs. FIG. 12A: IFN-γ; FIG. 12B: TNF-α; FIG. 12C: IL2.

[0055] FIGS. 13A-13C: Binding of NEG258- and NEG218-based TBMs to murine 300.19 cell lines that overexpress human CD19 (FIG. 13A) or cyno CD19 (FIG. 13B). The TBMs show negligible binding to the wild type 300.19 cell line (FIG. 13C).

[0056] FIG. 14: A schematic representation of CD58.

[0057] FIG. 15: Redirected T cell cytotoxicity by TBMs containing CD58 variant sequences.

[0058] FIG. 16: Antigen-independent T-cell activation by TBMs containing CD58 variant sequences. Data expressed as relative luminescence units (RLU).

[0059] FIGS. 17A-17H: CD19 and CD58 expression on various cell lines: FIGS. 17A-17B: CD19 and CD58 expression, respectively, on OCI-LY-19 cells; FIGS. 17C-17D: CD19 and CD58 expression, respectively, on Karpas-422 cells; FIGS. 17E-17F: CD19 and CD58 expression, respectively, on Toledo cells; FIGS. 17G-17H: CD19 and CD58 expression, respectively, on Nalm-6 cells.

[0060] FIGS. 18A-18B: Ability of NEG258-based TBMs and BBM to induce redirected T cell cytotoxicity by human donor cells against Karpas422 target cells. FIG. 18A and FIG. 18B show data using T cells from two different donors.

[0061] FIGS. 19A-19F: Induction of T cell cytokine release by NEG258-based TBMs and BBM. FIGS. 19A-19B: IFN-γ (donor 1 and donor 2, respectively); FIGS. 19C-19D: IL-2 (donor 1 and donor 2, respectively); FIGS. 19E-19F: TNF-α (donor 1 and donor 2, respectively). Triangles on X-axis indicate decreasing concentration of constructs from left to right in the figures.

[0062] FIG. 20: NEG258-based TBM and BBM binding to T cells.

[0063] FIGS. 21A-21C: NEG258-based TBM and BBM mediated T cell proliferation. FIG. 21A: T cell proliferation in OC-LY-19 co-culture; FIG. 21B: T cell proliferation in Karpas422 co-culture; FIG. 21C: T cell proliferation in Toledo co-culture.

[0064] FIGS. 22A-22B: Ability of NEG258-based TBMs and BBM to induce redirected T cell cytotoxicity by human donor cells against Karpas422 target cells. FIG. 22A and FIG. 22B show data using T cells from two different donors.

[0065] FIGS. 23A-23J: Ability of NEG258-based TBMs and BBM to induce redirected T cell cytotoxicity by human donor cells against various target cells. FIGS. 23A-23B: OC-LY-19 (donor 1 and donor 2, respectively); FIGS. 23C-23D: Toledo (donor 1 and donor 2, respectively); FIGS. 23E-23F: Nalm6 (donor 1 and donor 2, respectively); FIGS. 23G-23H: Nalm6 KO (donor 1 and donor 2, respectively); FIGS. 23I-23J: K562 (donor 1 and donor 2, respectively).

[0066] FIGS. 24A-24J: Induction of T cell cytokine release by NEG258-based TBMs and BBM in various target cells. FIGS. 24A-24B: TNF-α from OC-LY-19 (donor 1 and donor 2, respectively); FIGS. 24C-24D: TNF-α from Toledo (donor 1 and donor 2, respectively); FIGS. 24E-24F: TNF-α from Nalm6 (donor 1 and donor 2, respectively); FIGS. 24G-24H: TNF-α from Nalm6 KO (donor 1 and donor 2, respectively); FIGS. 241-24J: TNF-α from K562 (donor 1 and donor 2, respectively).

[0067] FIGS. 25A-25H: Re-challenge RTCC assay with Karpas 422 and OCI-LY-19 cell lines. FIG. 25A: assay set-up. FIGS. 25B-25D: Karpas 422 (post first challenge, post second challenge, and post third challenge, respectively); FIGS. 25E-25H OCI-LY-19 (post first challenge, post second challenge, post third challenge, and post fourth challenge, respectively).

[0068] FIGS. 26A-26P: Re-challenge T cell phenotyping with Karpas 422 and OCI-LY-19 cell lines. FIGS. 26A-26H: Karpas 422 phenotyping; FIGS. 26I-26P: OCI-LY-19 phenotyping. FIGS. 26A and 261: % IL-2+CD4 T cells; FIGS. 26B and 26J: % IFNγ+CD4 T cells; FIGS. 26C and 26K: % IL-2+CD8 T cells; FIGS. 26D and 26L: % IFNγ+CD8 T cells; FIGS. 26E and 26M: CD3 young; FIGS. 26F and 26N: CD4 old; FIGS. 26G and 26O: CD8 young; FIGS. 26H and 26P: CD8 old. Lines in figures represent different T cell donors.

[0069] FIGS. 27A-27D: Ability of CD3hi TSP1 vs. CD3hi BSP1 to elicit T cell proliferation in presence of CD19+ target cells. Nalm6-luc cells were co-cultured for 72 h with sorted CD28+ or CD28⁻ CD8 T cells at an E:T ratio of 1:3 in the presence of 1 nM (FIGS. 27A-27B) or 0.1 nM (FIGS. 27C-27D) CD3hi TSP1 or CD3hi BSP1 and in presence (FIGS. 27A and 27C) or absence (FIGS. 27B and 27D) of irradiated autologous PBMCs (T cells depleted). Proliferation was measured as percentage of CFSE-diluted cells among the live cells.

[0070] FIGS. 28A-28L: Ability of CD3hi TSP1 and CD3hi BSP1 to induce T cells' cytokines production in presence of Nalm6 CD19+ target cells (E:T 1:3). FIGS. 28A-28B: median fluorescence intensity (MFI) for GzB (FIG. 28A) and IFN-γ (FIG. 28B) producing CD28⁻ and CD28⁺CD8 T cells, when co-cultured in presence of irradiated PBMCs and 1 nM CD3hi TSP1 or 1 nM CD3hi BSP1. FIGS. 28C-28D: MFI for GzB (FIG. 28C) and IFN-γ (FIG. 28D) producing CD28⁻ and CD28⁺CD8 T cells, when co-cultured in absence of irradiated PBMCs and 1 nM CD3hi TSP1 or 1 nM CD3hi BSP1. FIGS. 28E-28F: MFI for GzB (FIG. 28E) and IFN-γ (FIG. 28F) producing CD28⁻ and CD28⁺CD8 T cells, when co-cultured in presence of irradiated PBMCs and 0.1 nM CD3hi TSP1 or 0.1 nM CD3hi BSP1. FIGS. 28G-28H: MFI for GzB (FIG. 28G) and IFN-γ (FIG. 28H) producing CD28⁻ and CD28⁺CD8 T cells, when co-cultured in absence of irradiated PBMCs and 0.1 nM CD3hi TSP1 or 0.1 nM CD3hi BSP1. FIGS. 28I-28L: proportions of live T cells, when co-cultured in the presence (FIGS. 281 and 28K) or absence (FIGS. 28J and 28L) of irradiated PBMCs and 1 nM (FIGS. 281 and 28J) or 0.1 nM (FIG. 28K and FIG. 28L) CD3hi TSP1 or CD3hi BSP1.

[0071] FIGS. 29A-29I: Ability of CD3hi TSP1 vs. CD3hi BSP1 to induce changes in T cell phenotype. FIG. 29A: Representative example of CD28⁻ and CD28⁺ T cells sorted for CCR7 and CD45RO expression. FIGS. 29B-29I: distribution of different T cell populations defined according to the combined expression of the two surface markers CD45RO and CCR7 (naive, CD45RO⁻CCR7⁺; central memory (CM), CD45RO⁺CCR7⁺; effector memory (EM), CD45RO⁺CCR7⁻; and terminally differentiated (TEMRA), CD45RO⁻CCR7⁻) following 72 hour co-culture (E:T 1:3) in the presence (FIGS. 29B-29E) or absence (FIGS. 29F-29I) of PBMCs and presence of 1 nM (FIGS. 29B-29C and 29F-29G) or 0.1 nM (FIGS. 29D-29E and 29H-29I) CD3hi TSP1 or CD3hi BSP1. Data for proliferating cells (CFSE−) are shown in FIGS. 29B, 29D, 29F, and 29H. Data for non-proliferating cells (CSFE+) are shown in FIGS. 29C, 29E, 29G, and 29I. Data for CD28− cells are shown on the left side of each figure and data for CD28+ cells are shown on the right side of the figure.

[0072] FIGS. 30A-30D: Ability of CD3hi TSP1 vs. CD3hi BSP1 to elicit redirected T-cell cytotoxic activity (RTCC) against CD19+ target cells. RTCC results from Nalm6-luc cells co-cultured for 72h with sorted CD28+ or CD28− CD8 T cells at an E:T ratio of 1:3 in the presence of 1 nM (FIGS. 30A and 30C) or 0.1 nM (FIGS. 30B and 30D) of CD3hi BSP1, CD3hi TSP1, or CD3hi TSP1C and in the presence (FIGS. 30A and 30B) or absence (FIGS. 30C and 30D) of irradiated autologous PBMCs (T cells depleted). (n=3) Luminescence signal was measured at the end of the co-culture incubation. Results are expressed as fold increase vs. untreated condition, where no antibodies were added in order to evaluate the background signal given by the control antibody.

[0073] FIGS. 31A-31B: Anti-tumor activity of CD3hi TSP1 (FIG. 31A) and CD3med TSP1 (FIG. 31B) in a human PBMC adoptive transfer adaptation of the OCI-LY-19 subcutaneous tumor model.

[0074] FIGS. 32A-32B: Body weight change following treatment with CD3hi TSP1 (FIG. 32A) and CD3med TSP1 (FIG. 32B) in a human PBMC adoptive transfer adaptation of the OCI-LY-19 subcutaneous tumor model.

[0075] FIG. 33: Schematic of the humanization process of a NSG mouse.

[0076] FIGS. 34A-34B: Anti-tumor activity of CD3 TSP1, CD3hi BSP1 and CD3med TSP1 in a DLBCL subcutaneous tumor model in huCD34+ NSG mice (FIG. 34A) and body weight change following treatment with CD3 TSP1, CD3hi BSP1 and CD3med TSP1 in the DLBCL subcutaneous tumor model in huCD34+ NSG mice (FIG. 34B).

[0077] FIGS. 35A-35D: Anti-tumor activity (FIGS. 35A and 35C) and body weight response (FIG. 35B and FIG. 35D) following antibody treatment with CD3hi TSP1 (FIGS. 35A and 35B) and CD3med TSP1 (FIGS. 35C and 35D) in a OCI-LY-19 DLBCL subcutaneous tumor model in huCD34+ NSG mice.

[0078] FIGS. 36A-36C: Anti-tumor activity of CD3hi BSP1 (FIG. 36A), CD3hi TSP1 (FIG. 36B), and CD3med TSP1 (FIG. 36C) in a human PBMC adoptive transfer adaptation of the Daudi-Luc subcutaneous tumor model.

[0079] FIGS. 37A-37C: Body weight change following antibody treatment with CD3hi BSP1 (FIG. 37A), CD3hi TSP1 (FIG. 37B), or CD3med TSP1 (FIG. 37C) in a human PBMC adoptive transfer adaptation of the Daudi-Luc subcutaneous tumor model.

[0080] FIGS. 38A-38B: Shows schematic overview of a Biacore measuring cycle.

[0081] FIGS. 39A.1-39C.11: Shows representative sensorgrams and response and concentration plots. FIG. 39A.1 to FIG. 39A.11 (collectively, “FIG. 39A”) show representative sensorgrams and response plots of WT IgG1, LALAPA-IgG1, LALAGA-IgG1, LALAPG-IgG1, DAPA-IgG1, LALASKPA-IgG1, DAPASK-IgG1, GADAPA-IgG1, GADAPASK-IgG1 and DANAPA-IgG1. (Concentration range: 0.2 nM-100 nM for human FcγR1A); FIG. 39B.1 to FIG. B.11 (collectively, “FIG. 39B”) show sensorgrams and binding kinetics of WT, LALAPA-IgG1, LALAGA-IgG1, LALAPG-IgG1, DAPA-IgG1, LALASKPA-IgG1, DAPASK-IgG1, GADAPA-IgG1, GADAPASK-IgG1 and DANAPA-IgG1 towards FcgammaR3A V158 (Concentration range: 1.95 nM-1000 nM for human FcγR3A V158); FIG. 39C.1 to FIG. 39C.11 (“collectively, “FIG. 39C”) show sensorgrams and binding kinetics of WT, LALAPA-IgG1, LALAGA-IgG1, LALAPG-IgG1, DAPA-IgG1, LALASKPA-IgG1, DAPASK-IgG1, GADAPA-IgG1, GADAPASK-IgG1 and DANAPA-IgG1 towards C1q. (Concentration range: 0.49 nM-250 nM for human C1q)

[0082] FIGS. 40A-40B: FIG. 40A shows the nuclear factor of activated T-cells (NFAT) pathway activity of the wild type and mutated antibodies. FIG. 40B shows the NFAT pathway activity of the wild type and mutated antibodies, cells sensitized with addition of INFgamma.

[0083] FIGS. 41A-41E: Shows representative sensorgrams and response plots of WT, DANAPA, GADAPASK, LALA and LALASKPA variants. (Concentration range: 0.2 nM-25 nM for human FcγR1A)

[0084] FIG. 42: Shows the nuclear factor of activated T-cells (NFAT) pathway activity of the wild type and mutated antibodies.

[0085] FIGS. 43A-43B: IL-6 (FIG. 43A) and TNF-α (FIG. 43B) secretion from B-cell depleted PBMC-Karpas 422 and T-cell Karpas 422 co-cultures in the presence of CD3hi TSP1 and added B cells.

[0086] FIGS. 44A-44E: BAFF-R and CD19 expression on luciferized B-cell lymphoma cell lines measured by flow cytometry. FIG. 44A.1-44A.2: DOHH-2 Luc; FIG. 44B.1-44B.2: Karpas 422 Luc; FIG. 44C.1-44C.2: OCILY-19 Luc; FIG. 44D.1-44D.2: SU-DHL-4 Luc; FIG. 44E.1-44E.2: Toledo Luc.

[0087] FIGS. 45A-45C: Combined target cell killing from the combination of the anti-BAFFR antibody VAY736 and CD3hi TSP1 TBM in B cell depleted PBMC-Karpas 422 cell co-cultures from two donors (FIGS. 45A-45B and FIG. 45C, respectively). Dotted line in each of FIGS. 45A-45C indicates target cell killing induced by the selected concentration of CD3hi TSP1 in the absence of any VAY736 or Isotype Afuc antibody.

[0088] FIGS. 46A-46D: Tumor growth in an in vivo model of DLBCL in animals treated with vehicle (FIG. 46A), VAY736 at 5 mg/kg (FIG. 46B), VAY736 50 mg/kg (FIG. 46C) or rituximab (FIG. 46D).

### 7. DETAILED DESCRIPTION

### 7.1. Definitions

[0089] As used herein, the following terms are intended to have the following meanings:

[0090] ABM chain: Individual ABMs can exist as one (e.g., in the case of an scFv) polypeptide chain or form through the association of more than one polypeptide chains (e.g., in the case of a Fab). As used herein, the term “ABM chain” refers to all or a portion of an ABM that exists on a single polypeptide chain. The use of the term “ABM chain” is intended for convenience and descriptive purposes only and does not connote a particular configuration or method of production.

[0091] ADCC: By “ADCC” or “antibody dependent cell-mediated cytotoxicity” as used herein is meant the cell-mediated reaction where nonspecific cytotoxic cells that express FcγRs recognize bound antibody on a target cell and subsequently cause lysis of the target cell. ADCC is correlated with binding to FcγRIIIa; increased binding to FcγRIIIa leads to an increase in ADCC activity.

[0092] ADCP: By “ADCP” or antibody dependent cell-mediated phagocytosis as used herein is meant the cell-mediated reaction where nonspecific phagocytic cells that express FcγRs recognize bound antibody on a target cell and subsequently cause phagocytosis of the target cell.

[0093] Antibody: The term “antibody” as used herein refers to a polypeptide (or set of polypeptides) of the immunoglobulin family that is capable of binding an antigen non-covalently, reversibly and specifically. For example, a naturally occurring “antibody” of the IgG type is a tetramer comprising at least two heavy (H) chains and two light (L) chains inter-connected by disulfide bonds. Each heavy chain is comprised of a heavy chain variable region (abbreviated herein as VH) and a heavy chain constant region. The heavy chain constant region is comprised of three domains, CH1, CH2 and CH3. Each light chain is comprised of a light chain variable region (abbreviated herein as VL) and a light chain constant region. The light chain constant region is comprised of one domain (abbreviated herein as CL). The VH and VL regions can be further subdivided into regions of hypervariability, termed complementarity determining regions (CDR), interspersed with regions that are more conserved, termed framework regions (FR). Each VH and VL is composed of three CDRs and four FRs arranged from amino-terminus to carboxy-terminus in the following order: FR1, CDR1, FR2, CDR2, FR3, CDR3, FR4. The variable regions of the heavy and light chains contain a binding domain that interacts with an antigen. The constant regions of the antibodies can mediate the binding of the immunoglobulin to host tissues or factors, including various cells of the immune system (e.g., effector cells) and the first component (C1q) of the classical complement system. The term “antibody” includes, but is not limited to, monoclonal antibodies, human antibodies, humanized antibodies, camelised antibodies, chimeric antibodies, bispecific or multispecific antibodies and anti-idiotypic (anti-Id) antibodies (including, e.g., anti-Id antibodies to antibodies of the disclosure). The antibodies can be of any isotype/class (e.g., IgG, IgE, IgM, IgD, IgA and IgY) or subclass (e.g., IgG1, IgG2, IgG3, IgG4, IgA1 and IgA2).

[0094] Both the light and heavy chains are divided into regions of structural and functional homology. The terms “constant” and “variable” are used functionally. In this regard, it will be appreciated that the variable domains of both the light (VL) and heavy (VH) chain portions determine antigen recognition and specificity. Conversely, the constant domains of the light chain (CL) and the heavy chain (CH1, CH2 or CH3) confer important biological properties such as secretion, transplacental mobility, Fc receptor binding, complement binding, and the like. By convention the numbering of the constant region domains increases as they become more distal from the antigen-binding site or amino-terminus of the antibody. In a wild-type antibody, at the N-terminus is a variable region and at the C-terminus is a constant region; the CH3 and CL domains actually comprise the carboxy-terminus of the heavy and light chain, respectively.

[0095] Antibody fragment: The term “antibody fragment” of an antibody as used herein refers to one or more portions of an antibody. In some embodiments, these portions are part of the contact domain(s) of an antibody. In some other embodiments, these portion(s) are antigen-binding fragments that retain the ability of binding an antigen non-covalently, reversibly and specifically, sometimes referred to herein as the “antigen-binding fragment”, “antigen-binding fragment thereof,” “antigen-binding portion”, and the like. Examples of binding fragments include, but are not limited to, single-chain Fvs (scFv), a Fab fragment, a monovalent fragment consisting of the VL, VH, CL and CH1 domains; a F(ab)2 fragment, a bivalent fragment comprising two Fab fragments linked by a disulfide bridge at the hinge region; a Fd fragment consisting of the VH and CH1 domains; a Fv fragment consisting of the VL and VH domains of a single arm of an antibody; a dAb fragment (Ward et al., 1989, Nature 341:544-546), which consists of a VH domain; and an isolated complementarity determining region (CDR). Thus, the term “antibody fragment” encompasses both proteolytic fragments of antibodies (e.g., Fab and F(ab)2 fragments) and engineered proteins comprising one or more portions of an antibody (e.g., an scFv).

[0096] Antibody fragments can also be incorporated into single domain antibodies, maxibodies, minibodies, intrabodies, diabodies, triabodies, tetrabodies, v-NAR and bis-scFv (see, e.g., Hollinger and Hudson, 2005, Nature Biotechnology 23: 1126-1136). Antibody fragments can be grafted into scaffolds based on polypeptides such as Fibronectin type III (Fn3) (see U.S. Pat. No. 6,703,199, which describes fibronectin polypeptide monobodies).

[0097] Antibody fragments can be incorporated into single chain molecules comprising a pair of tandem Fv segments (for example, VH—CH1-VH—CH1) which, together with complementary light chain polypeptides (for example, VL-VC-VL-VC), form a pair of antigen-binding regions (Zapata et al., 1995, Protein Eng. 8:1057-1062; and U.S. Pat. No. 5,641,870).

[0098] Antibody Numbering System: In the present specification, the references to numbered amino acid residues in antibody domains are based on the EU numbering system unless otherwise specified (for example, in Table 1). This system was originally devised by Edelman et al., 1969, Proc. Nat'l Acad. Sci. USA 63:78-85 and is described in detail in Kabat et al., 1991, in Sequences of Proteins of Immunological Interest, US Department of Health and Human Services, NIH, USA.

[0099] Antigen-binding module: The term “antigen-binding module” or “ABM” as used herein refers to a portion of a MBM that has the ability to bind to an antigen non-covalently, reversibly and specifically. An ABM can be immunoglobulin- or non-immunoglobulin-based. As used herein, the terms “ABM1” and “CD19 ABM” (and the like) refer to an ABM that binds specifically to CD19, the terms “ABM2” and “TCR ABM” (and the like) refer to an ABM that binds specifically to a component of a TCR complex, the term “ABM3” refers to an ABM that binds specifically to CD2 or to a TAA (depending on context), the term “CD2 ABM” (and the like) refers to an ABM that binds specifically to CD2, and the term “TAA ABM” (and the like) refers to an ABM that binds specifically to a TAA. The terms ABM1, ABM2, and ABM3 are used merely for convenience and are not intended to convey any particular configuration of a MBM. In some embodiments, an ABM2 binds to CD3 (referred to herein a “CD3 ABM” or the like). Accordingly, disclosures relating to ABM2 and ABM2s are also applicable to CD3 ABMs.

[0100] Antigen-binding fragment: The term “antigen-binding fragment” of an antibody refers to a portion of an antibody that retains has the ability to bind to an antigen non-covalently, reversibly and specifically.

[0101] Antigen-binding molecule: The term “antigen-binding molecule” refers to a molecule comprising one or more antigen-binding domains, for example an antibody. The antigen-binding molecule can comprise one or more polypeptide chains, e.g., one, two, three, four or more polypeptide chains. The polypeptide chains in an antigen-binding molecule can be associated with one another directly or indirectly (for example a first polypeptide chain can be associated with a second polypeptide chain which in turn can be associated with a third polypeptide chain to form an antigen-binding molecule in which the first and second polypeptide chains are directly associated with one another, the second and third polypeptide chains are directly associated with one another, and the first and third polypeptide chains are indirectly associated with one another through the second polypeptide chain).

[0102] Associated: The term “associated” in the context of an antigen-binding molecule refers to a functional relationship between two or more polypeptide chains and/or two or more portions of a single polypeptide chain. In particular, the term “associated” means that two or more polypeptides (or portions of a single polypeptide) are associated with one another, e.g., non-covalently through molecular interactions and/or covalently through one or more disulfide bridges or chemical cross-linkages, so as to produce a functional antigen-binding molecule, e.g., a BBM or TBM in which the antigen binding domains can bind their respective targets. Examples of associations that might be present in a MBM include (but are not limited to) associations between Fc regions in an Fc domain (homodimeric or heterodimeric as described in Section 7.2.2.1.5), associations between VH and VL regions in a Fab or Fv, and associations between CH1 and CL in a Fab.

[0103] BAFF: The term “BAFF” refers to the B-cell activating factor protein. BAFF is also known as tumor necrosis factor ligand superfamily member 13B and B Lymphocyte Stimulator (BLyS). The human and murine amino acid and nucleic acid sequences can be found in a public database, such as GenBank, UniProt and Swiss-Prot. For example, an amino acid sequence of human BAFF can be found as UniProt/Swiss-Prot Accession No. Q9Y275 and a nucleotide sequences encoding human BAFF can be found at Accession Nos. NM_006573.5. BAFF is a ligand for BAFFR, and plays a role in the proliferation and differentiation of B cells.

[0104] BAFFR: The term “BAFFR” refers to the B-cell activating factor receptor protein. BAFFR is also known as TNF Receptor Superfamily Member 13C (TNFRSF13C). The human and murine amino acid and nucleic acid sequences can be found in a public database, such as GenBank, UniProt and Swiss-Prot. For example, an amino acid sequence of human BAFFR can be found as UniProt/Swiss-Prot Accession No. Q96RJ3 and a nucleotide sequences encoding human BAFFR can be found at Accession Nos. NM_052945.4. It is expressed predominantly on B-lymphocytes and on a subset of T-cells.

[0105] B cell: As used herein, the term “B cell” refers to a cell of B cell lineage, which is a type of white blood cell of the lymphocyte subtype. Examples of B cells include plasmablasts, plasma cells, lymphoplasmacytoid cells, memory B cells, follicular B cells, marginal zone B cells, B-1 cells, B-2 cells, and regulatory B cells.

[0106] B cell targeting agent: As used herein the term “B cell targeting agent” refers to an agent (e.g., a therapeutic agent) that binds to a B-cell cell surface molecule (e.g., via the antigen binding domain of an antibody) and/or depletes human B cells in vitro and/or in vivo. A B cell targeting agent that depletes B cells is referred to herein as a “B cell depleting agent.” A B cell depleting agent, e.g., a B cell depleting antibody, that depletes B cells in vitro preferably depletes B cells with an EC50 of 10 nM or less, preferably with an EC50 of 1 nM or less, more preferably with an EC50 of 100 pM, or less, as measured in a human B cell depletion assay. A B cell depleting agent that depletes B cells in vivo, e.g., in a mouse model, preferably reduces in vivo the percentage of B cells up to 70%, preferably 80% and more preferably 90% or more, as measured by fluorescence activated cell sorting (FACS) of B cells. B cell depletion assays for measuring in vitro and in vivo B cell depletion are described in WO 2010/007082, the contents of which are incorporated herein by reference in their entireties.

[0107] B cell malignancy: As used herein, a B cell malignancy refers to an uncontrolled proliferation of B cells. Examples of B cell malignancy include non-Hodgkin's lymphomas (NHL), Hodgkin's lymphomas, leukemia, and myeloma. For example, a B cell malignancy can be, but is not limited to, multiple myeloma, chronic lymphocytic leukemia (CLL)/small lymphocytic lymphoma (SLL), follicular lymphoma, mantle cell lymphoma (MCL), diffuse large B-cell lymphoma (DLBCL), marginal zone lymphomas, Burkitt lymphoma, lymphoplasmacytic lymphoma (Waldenstrom macroglobulinemia), hairy cell leukemia, splenic marginal zone B-cell lymphoma, extranodal marginal zone lymphoma (EMZL), nodal marginal zone B-cell lymphoma (NZML), and primary effusion lymphoma.

[0108] Binding Sequences: In reference to Tables 1, 9, 10, 11, 14, 15, 18, or 19 (including subparts thereof), the term “binding sequences” means an ABM having a full set of CDRs, a VH-VL pair, or an scFv set forth in that table.

[0109] Bispecific binding molecule: The term “bispecific binding molecule” or “BBM” refers to a molecule that specifically binds to two antigens and comprises two or more ABMs. The BBMs of the disclosure comprise at least one antigen-binding domain which is specific for CD19 and at least one antigen-binding domain which is specific for a different antigen, e.g., component of a TCR complex. Representative BBMs are illustrated in FIG. 1B-1AH. BBMs can comprise one, two, three, four or even more polypeptide chains.

[0110] Bivalent: The term “bivalent” as used herein in the context of an antigen-binding molecule refers to an antigen-binding molecule that has two antigen-binding domains. The domains can be the same or different. Accordingly, a bivalent antigen-binding molecule can be monospecific or bispecific. Bivalent BBMs can comprise an ABM that specifically binds to CD19 and another ABM that binds to another antigen, e.g., a component of the TCR complex.

[0111] Cancer: The term “cancer” refers to a disease characterized by the uncontrolled (and often rapid) growth of aberrant cells. Cancer cells can spread locally or through the bloodstream and lymphatic system to other parts of the body. Examples of cancers include the B cell malignancies described herein. The term “cancerous B cell” refers to a B cell that is undergoing or has undergone uncontrolled proliferation.

[0112] CD3: The term “CD3” or “cluster of differentiation 3” refers to the cluster of differentiation 3 co-receptor of the T cell receptor. CD3 helps in activation of both cytotoxic T-cell (e.g., CD8+naïve T cells) and T helper cells (e.g., CD4+naïve T cells) and is composed of four distinct chains: one CD3γ chain (e.g., Genbank Accession Numbers NM_000073 and MP_000064 (human)), one CD36 chain (e.g., Genbank Accession Numbers NM_000732, NM_001040651, NP_00732 and NP_001035741 (human)), and two CD3E chains (e.g., Genbank Accession Numbers NM_000733 and NP_00724 (human)). The chains of CD3 are highly related cell-surface proteins of the immunoglobulin superfamily containing a single extracellular immunoglobulin domain. The CD3 molecule associates with the T-cell receptor (TCR) and ζ-chain to form the T-cell receptor (TCR) complex, which functions in generating activation signals in T lymphocytes. Unless expressly indicated otherwise, the reference to CD3 in the application can refer to the CD3 co-receptor, the CD3 co-receptor complex, or any polypeptide chain of the CD3 co-receptor complex.

[0113] CD19: The term “CD19” or “cluster of differentiation 19” refers to the Cluster of Differentiation 19 protein, which is an antigenic determinant detectable on leukemia precursor cells. The human and murine amino acid and nucleic acid sequences can be found in a public database, such as GenBank, UniProt and Swiss-Prot. For example, the amino acid sequence of human CD19 can be found as UniProt/Swiss-Prot Accession No. P15391 and the nucleotide sequence encoding of the human CD19 can be found at Accession No. NM_001178098. CD19 is expressed on most B lineage cancers, including, e.g., acute lymphoblastic leukaemia, chronic lymphocytic leukemia (CLL)/small lymphocytic lymphoma (SLL) and non-Hodgkin's lymphoma. It is also an early marker of B cell progenitors. See, e.g., Nicholson et al., 1997, Mol. Immun. 34 (16-17): 1157-1165.

[0114] Anti-CD19 Agent: The term “anti-CD19 agent” refers to an agent (e.g., a therapeutic agent) targeting CD19. Examples of anti-CD19 agents include CD19 binding molecules (including monospecific and multispecific antigen binding molecules) such as blinatumomab, NEG218-based monospecific and multispecific binding molecules described herein, NEG258-based monospecific and multispecific binding molecules described herein, and CAR T compositions such as tisagenlecleucel, axicabtagene ciloleucel, and brexucabtagene autoleucel.

[0115] Chimeric Antibody: The term “chimeric antibody” (or antigen-binding fragment thereof) is an antibody molecule (or antigen-binding fragment thereof) in which (a) the constant region, or a portion thereof, is altered, replaced or exchanged so that the antigen-binding site (variable region) is linked to a constant region of a different or altered class, effector function and/or species, or an entirely different molecule which confers new properties to the chimeric antibody, e.g., an enzyme, toxin, hormone, growth factor, drug, etc.; or (b) the variable region, or a portion thereof, is altered, replaced or exchanged with a variable region having a different or altered antigen specificity. For example, a mouse antibody can be modified by replacing its constant region with the constant region from a human immunoglobulin. Due to the replacement with a human constant region, the chimeric antibody can retain its specificity in recognizing the antigen while having reduced antigenicity in human as compared to the original mouse antibody.

[0116] Chimeric Antigen Receptor: The term “Chimeric Antigen Receptor” or alternatively a “CAR” refers to a set of polypeptides, typically two in the simplest embodiments, which when in an immune effector cell, provides the cell with specificity for a target cell, typically a cancer cell, and with intracellular signal generation. In some embodiments, a CAR comprises at least an extracellular antigen binding domain, a transmembrane domain and a cytoplasmic signaling domain (also referred to herein as “an intracellular signaling domain”) comprising a functional signaling domain derived from a stimulatory molecule and/or costimulatory molecule as defined below. The set of polypeptides can be contiguous or non-contiguous with each other. Where the polypeptides are not contiguous with one another, the set of polypeptides include a dimerization switch that, upon the presence of a dimerization molecule, can couple the polypeptides to one another, e.g., can couple an antigen binding domain to an intracellular signaling domain. CAR molecules are typically administered to a subject by way of administration of immune effector cells (e.g., T cells that are preferably autologous to the subject) engineered to express a CAR molecule.

[0117] In combination: Administered “in combination,” as used herein, means that two (or more) different treatments are delivered to the subject during the course of the subject's affliction with the disorder, e.g., the two or more treatments are delivered after the subject has been diagnosed with the disorder and before the disorder has been cured or eliminated or treatment has ceased for other reasons. The terms “combination” and “in combination” are not limited to the administration of two or more treatments at exactly the same time, but rather it is meant that a pharmaceutical composition comprising an agent (e.g., an anti-CD19 agent or B cell targeting agent) is administered to a subject in a sequence and within a time interval such that the agent can act together with the additional therapy(ies) to provide an increased benefit than if they were administered otherwise.

[0118] Complementarity Determining Region: The terms “complementarity determining region” or “CDR,” as used herein, refer to the sequences of amino acids within antibody variable regions which confer antigen specificity and binding affinity. For example, in general, there are three CDRs in each heavy chain variable region (e.g., CDR-H1, CDR-H2, and CDR-H3) and three CDRs in each light chain variable region (CDR-L1, CDR-L2, and CDR-L3). The precise amino acid sequence boundaries of a given CDR can be determined using any of a number of well-known schemes, including those described by Kabat et al., 1991, “Sequences of Proteins of Immunological Interest,” 5th Ed. Public Health Service, National Institutes of Health, Bethesda, MD (“Kabat” numbering scheme), Al-Lazikani et al., 1997, JMB 273:927-948 (“Chothia” numbering scheme) and ImMunoGenTics (IMGT) numbering (Lefranc, 1999, The Immunologist 7:132-136; Lefranc et al., 2003, Dev. Comp. Immunol. 27:55-77 (“IMGT” numbering scheme). For example, for classic formats, under Kabat, the CDR amino acid residues in the heavy chain variable domain (VH) are numbered 31-35 (CDR-H1), 50-65 (CDR-H2), and 95-102 (CDR-H3); and the CDR amino acid residues in the light chain variable domain (VL) are numbered 24-34 (CDR-L1), 50-56 (CDR-L2), and 89-97 (CDR-L3). Under Chothia, the CDR amino acids in the VH are numbered 26-32 (CDR-H1), 52-56 (CDR-H2), and 95-102 (CDR-H3); and the amino acid residues in VL are numbered 26-32 (CDR-L1), 50-52 (CDR-L2), and 91-96 (CDR-L3). By combining the CDR definitions of both Kabat and Chothia, the CDRs consist of amino acid residues 26-35 (CDR-H1), 50-65 (CDR-H2), and 95-102 (CDR-H3) in human VH and amino acid residues 24-34 (CDR-L1), 50-56 (CDR-L2), and 89-97 (CDR-L3) in human VL. Under IMGT the CDR amino acid residues in the VH are numbered approximately 26-35 (CDR-H1), 51-57 (CDR-H2) and 93-102 (CDR-H3), and the CDR amino acid residues in the VL are numbered approximately 27-32 (CDR-L1), 50-52 (CDR-L2), and 89-97 (CDR-L3) (numbering according to “Kabat”). Under IMGT, the CDR regions of an antibody can be determined using the program IMGT/DomainGap Align.

[0119] Conservative Sequence Modifications: The term “conservative sequence modifications” refers to amino acid modifications that do not significantly affect or alter the binding characteristics of a CD19 binding molecule or a component thereof (e.g., a CD19-binding domain or an Fc region). Such conservative modifications include amino acid substitutions, additions and deletions. Modifications can be introduced into a binding molecule by standard techniques, such as site-directed mutagenesis and PCR-mediated mutagenesis. Conservative amino acid substitutions are ones in which the amino acid residue is replaced with an amino acid residue having a similar side chain. Families of amino acid residues having similar side chains have been defined in the art. These families include amino acids with basic side chains (e.g., lysine, arginine, histidine), acidic side chains (e.g., aspartic acid, glutamic acid), uncharged polar side chains (e.g., glycine, asparagine, glutamine, serine, threonine, tyrosine, cysteine, tryptophan), nonpolar side chains (e.g., alanine, valine, leucine, isoleucine, proline, phenylalanine, methionine), beta-branched side chains (e.g., threonine, valine, isoleucine) and aromatic side chains (e.g., tyrosine, phenylalanine, tryptophan, histidine). Thus, one or more amino acid residues within a binding molecule can be replaced with other amino acid residues from the same side chain family and the altered binding molecule can be tested for, e.g., binding to target molecules and/or effective heterodimerization and/or effector function.

[0120] Diabody: The term “diabody” as used herein refers to small antibody fragments with two antigen-binding sites, typically formed by pairing of scFv chains. Each scFv comprises a heavy chain variable domain (VH) connected to a light chain variable domain (VL) in the same polypeptide chain (VH-VL, where the VH is either N-terminal or C-terminal to the VL). Unlike a typical scFv in which the VH and VL are separated by a linker that allows the VH and VL on the same polypeptide chain to pair and form an antigen-binding domain, diabodies typically comprise a linker that is too short to allow pairing between the VH and VL domains on the same chain, forcing the VH and VL domains to pair with the complementary domains of another chain and create two antigen-binding sites. Diabodies are described more fully in, for example, EP 404,097; WO 93/11161; and Hollinger et al., 1993, Proc. Natl. Acad. Sci. USA 90:6444-6448.

[0121] dsFv: The term “dsFv” refers to disulfide-stabilized Fv fragments. In a dsFv, a VH and VL are connected by an interdomain disulfide bond. To generate such molecules, one amino acid each in the framework region of in VH and VL are mutated to a cysteine, which in turn form a stable interchain disulfide bond. Typically, position 44 in the VH and position 100 in the VL are mutated to cysteines. See Brinkmann, 2010, Antibody Engineering 181-189, DOI:10.1007/978-3-642-01147-4_14. The term dsFv encompasses both what is known as a dsFv (a molecule in which the VH and VL are connected by an interchain disulfide bond but not a linker peptide) or scdsFv (a molecule in which the VH and VL are connected by a linker as well as an interchain disulfide bond).

[0122] Effector Function: The term “effector function” refers to an activity of an antibody molecule that is mediated by binding through a domain of the antibody other than the antigen-binding domain, usually mediated by binding of effector molecules. Effector function includes complement-mediated effector function, which is mediated by, for example, binding of the C1 component of the complement to the antibody. Activation of complement is important in the opsonization and lysis of cell pathogens. The activation of complement also stimulates the inflammatory response and may also be involved in autoimmune hypersensitivity. Effector function also includes Fc receptor (FcR)-mediated effector function, which can be triggered upon binding of the constant domain of an antibody to an Fc receptor (FcR). Binding of antibody to Fc receptors on cell surfaces triggers a number of important and diverse biological responses including engulfment and destruction of antibody-coated particles, clearance of immune complexes, lysis of antibody-coated target cells by killer cells (called antibody-dependent cell-mediated cytotoxicity, or ADCC), release of inflammatory mediators, placental transfer and control of immunoglobulin production. An effector function of an antibody can be altered by altering, e.g., enhancing or reducing, the affinity of the antibody for an effector molecule such as an Fc receptor or a complement component. Binding affinity will generally be varied by modifying the effector molecule binding site, and in this case it is appropriate to locate the site of interest and modify at least part of the site in a suitable way. It is also envisaged that an alteration in the binding site on the antibody for the effector molecule need not alter significantly the overall binding affinity but can alter the geometry of the interaction rendering the effector mechanism ineffective as in non-productive binding. It is further envisaged that an effector function can also be altered by modifying a site not directly involved in effector molecule binding, but otherwise involved in performance of the effector function.

[0123] Epitope: An epitope, or antigenic determinant, is a portion of an antigen recognized by an antibody or other antigen-binding moiety as described herein. An epitope can be linear or conformational.

[0124] Fab: By “Fab” or “Fab region” as used herein is meant a polypeptide region that comprises the VH, CH1, VL, and CL immunoglobulin domain. These terms can refer to this region in isolation, or this region in the context of an antigen-binding molecule of the disclosure.

[0125] Fab domains are formed by association of a CH1 domain attached to a VH domain with a CL domain attached to a VL domain. The VH domain is paired with the VL domain to constitute the Fv region, and the CH1 domain is paired with the CL domain to further stabilize the binding module. A disulfide bond between the two constant domains can further stabilize the Fab domain.

[0126] Fab regions can be produced by proteolytic cleavage of immunoglobulin molecules (e.g., using enzymes such as papain) or through recombinant expression. In native immunoglobulin molecules, Fabs are formed by association of two different polypeptide chains (e.g., VH—CH1 on one chain associates with VL-CL on the other chain). The Fab regions are typically expressed recombinantly, typically on two polypeptide chains, although single chain Fabs are also contemplated herein.

[0127] Fc domain: The term “Fc domain” refers to a pair of associated Fc regions. The two Fc regions dimerize to create the Fc domain. The two Fc regions within the Fc domain can be the same (such an Fc domain being referred to herein as an “Fc homodimer”) or different from one another (such an Fc domain being referred to herein as an “Fc heterodimer”).

[0128] Fc region: The term “Fc region” or “Fc chain” as used herein is meant the polypeptide comprising the CH2-CH3 domains of an IgG molecule, and in some cases, inclusive of the hinge. In EU numbering for human IgG1, the CH2-CH3 domain comprises amino acids 231 to 447, and the hinge is 216 to 230. Thus the definition of “Fc region” includes both amino acids 231-447 (CH2-CH3) or 216-447 (hinge-CH2-CH3), or fragments thereof. An “Fc fragment” in this context can contain fewer amino acids from either or both of the N- and C-termini but still retains the ability to form a dimer with another Fc region as can be detected using standard methods, generally based on size (e.g., non-denaturing chromatography, size exclusion chromatography). Human IgG Fc regions are of particular use in the present disclosure, and can be the Fc region from human IgG1, IgG2 or IgG4.

[0129] Fv: The term “Fv” refers to the minimum antibody fragment derivable from an immunoglobulin that contains a complete target recognition and binding site. This region consists of a dimer of one heavy and one light chain variable domain in a tight, noncovalent association (VH-VL dimer). It is in this configuration that the three CDRs of each variable domain interact to define a target binding site on the surface of the VH-VL dimer. Often, the six CDRs confer target binding specificity to the antibody. However, in some instances even a single variable domain (or half of an Fv comprising only three CDRs specific for a target) can have the ability to recognize and bind target. The reference to a VH-VL dimer herein is not intended to convey any particular configuration. By way of example and not limitation, the VH and VL can come together in any configuration described herein to form a half antibody, or can each be present on a separate half antibody and come together to form an antigen binding domain when the separate half antibodies associate, for example to form a TBM of the disclosure. When present on a single polypeptide chain (e.g., a scFv), the VH and be N-terminal or C-terminal to the VL.

[0130] Half Antibody: The term “half antibody” refers to a molecule that comprises at least one ABM or ABM chain and can associate with another molecule comprising an ABM or ABM chain through, e.g., a disulfide bridge or molecular interactions (e.g., knob-in-hole interactions between Fc heterodimers). A half antibody can be composed of one polypeptide chain or more than one polypeptide chains (e.g., the two polypeptide chains of a Fab). In an embodiment, a half-antibody comprises an Fc region.

[0131] An example of a half antibody is a molecule comprising a heavy and light chain of an antibody (e.g., an IgG antibody). Another example of a half antibody is a molecule comprising a first polypeptide comprising a VL domain and a CL domain, and a second polypeptide comprising a VH domain, a CH1 domain, a hinge domain, a CH2 domain, and a CH3 domain, where the VL and VH domains form an ABM. Yet another example of a half antibody is a polypeptide comprising an scFv domain, a CH2 domain and a CH3 domain.

[0132] A half antibody might include more than one ABM, for example a half-antibody comprising (in N- to C-terminal order) an scFv domain, a CH2 domain, a CH3 domain, and another scFv domain.

[0133] Half antibodies might also include an ABM chain that when associated with another ABM chain in another half antibody forms a complete ABM.

[0134] Thus, a MBM can comprise one, more typically two, or even more than two half antibodies, and a half antibody can comprise one or more ABMs or ABM chains.

[0135] In some MBMs, a first half antibody will associate, e.g., heterodimerize, with a second half antibody. In other MBMs, a first half antibody will be covalently linked to a second half antibody, for example through disulfide bridges or chemical crosslinking. In yet other MBMs, a first half antibody will associate with a second half antibody through both covalent attachments and non-covalent interactions, for example disulfide bridges and knob-in-hole interactions.

[0136] The term “half antibody” is intended for descriptive purposes only and does not connote a particular configuration or method of production. Descriptions of a half antibody as a “first” half antibody, a “second” half antibody, a “left” half antibody, a “right” half antibody or the like are merely for convenience and descriptive purposes.

[0137] Hexavalent: The term “hexavalent” as used herein in the context of an antigen-binding molecule (e.g., a TBM) refers to an antigen-binding molecule that has six antigen-binding domains. Hexavalent TBMs of the disclosure generally have three pairs of antigen-binding domains that each bind to the same antigen, although different configurations (e.g., three antigen-binding domains that bind to CD19, two antigen-binding domains that bind to a component of a TCR complex, and one antigen-binding domain that binds to CD2 or a TAA, or three antigen-binding domains that bind to CD19, two antigen-binding domains that bind to CD2 or a TAA, and one antigen-binding domain that binds to a component of a TCR complex) are within the scope of the disclosure. Examples of hexavalent TBMs are shown schematically in FIGS. 1U-1V.

[0138] Hole: In the context of a knob-into-hole, a “hole” refers to at least one amino acid side chain which is recessed from the interface of a first Fc chain and is therefore positionable in a compensatory “knob” on the adjacent interfacing surface of a second Fc chain so as to stabilize the Fc heterodimer, and thereby favor Fc heterodimer formation over Fc homodimer formation, for example.

[0139] Host cell or recombinant host cell: The terms “host cell” or “recombinant host cell” refer to a cell that has been genetically-engineered, e.g., through introduction of a heterologous nucleic acid. It should be understood that such terms are intended to refer not only to the particular subject cell but to the progeny of such a cell. Because certain modifications can occur in succeeding generations due to either mutation or environmental influences, such progeny may not, in fact, be identical to the parent cell, but are still included within the scope of the term “host cell” as used herein. A host cell can carry the heterologous nucleic acid transiently, e.g., on an extrachromosomal heterologous expression vector, or stably, e.g., through integration of the heterologous nucleic acid into the host cell genome. For purposes of expressing an antigen-binding molecule, a host cell can be a cell line of mammalian origin or mammalian-like characteristics, such as monkey kidney cells (COS, e.g., COS-1, COS-7), HEK293, baby hamster kidney (BHK, e.g., BHK21), Chinese hamster ovary (CHO), NSO, PerC6, BSC-1, human hepatocellular carcinoma cells (e.g., Hep G2), SP2/0, HeLa, Madin-Darby bovine kidney (MDBK), myeloma and lymphoma cells, or derivatives and/or engineered variants thereof. The engineered variants include, e.g., glycan profile modified and/or site-specific integration site derivatives.

[0140] Human Antibody: The term “human antibody” as used herein includes antibodies having variable regions in which both the framework and CDR regions are derived from sequences of human origin. Furthermore, if the antibody contains a constant region, the constant region also is derived from such human sequences, e.g., human germline sequences, or mutated versions of human germline sequences or antibody containing consensus framework sequences derived from human framework sequences analysis, for example, as described in Knappik et al., 2000, J Mol Biol 296, 57-86. The structures and locations of immunoglobulin variable domains, e.g., CDRs, can be defined using well known numbering schemes, e.g., the Kabat numbering scheme, the Chothia numbering scheme, or a combination of Kabat and Chothia (see, e.g., Lazikani et al., 1997, J. Mol. Bio. 273:927 948; Kabat et al., 1991, Sequences of Proteins of Immunological Interest, 5th edit., NIH Publication no. 91-3242 U.S. Department of Health and Human Services; Chothia et al., 1987, J. Mol. Biol. 196:901-917; Chothia et al., 1989, Nature 342:877-883).

[0141] Human antibodies can include amino acid residues not encoded by human sequences (e.g., mutations introduced by random or site-specific mutagenesis in vitro or by somatic mutation in vivo, or a conservative substitution to promote stability or manufacturing). However, the term “human antibody”, as used herein, is not intended to include antibodies in which CDR sequences derived from the germline of another mammalian species, such as a mouse, have been grafted onto human framework sequences.

[0142] Humanized: The term “humanized” forms of non-human (e.g., murine) antibodies are chimeric antibodies that contain minimal sequence derived from non-human immunoglobulin. For the most part, humanized antibodies are human immunoglobulins (recipient antibody) in which residues from a hypervariable region of the recipient are replaced by residues from a hypervariable region of a non-human species (donor antibody) such as mouse, rat, rabbit or non-human primate having the desired specificity, affinity, and capacity. In some instances, framework region (FR) residues of the human immunoglobulin are replaced by corresponding non-human residues. Furthermore, humanized antibodies can comprise residues that are not found in the recipient antibody or in the donor antibody. These modifications are made to further refine antibody performance. In general, the humanized antibody will comprise substantially all of at least one, and typically two, variable domains, in which all or substantially all of the hypervariable loops correspond to those of a non-human immunoglobulin and all or substantially all of the FRs are those of a human immunoglobulin lo sequence. The humanized antibody optionally will also comprise at least a portion of an immunoglobulin constant region (Fc), typically that of a human immunoglobulin. For further details, see Jones et al., 1986, Nature 321:522-525; Riechmann et al., 1988, Nature 332:323-329; and Presta, 1992, Curr. Op. Struct. Biol. 2:593-596. See also the following review articles and references cited therein: Vaswani and Hamilton, 1998, Ann. Allergy, Asthma & Immunol. 1:105-115; Harris, 1995, Biochem. Soc. Transactions 23:1035-1038; Hurle and Gross, 1994, Curr. Op. Biotech. 5:428-433.

[0143] Knob: In the context of a knob-into-hole, a “knob” refers to at least one amino acid side chain which projects from the interface of a first Fc chain and is therefore positionable in a compensatory “hole” in the interface with a second Fc chain so as to stabilize the Fc heterodimer, and thereby favor Fc heterodimer formation over Fc homodimer formation, for example.

[0144] Knobs and holes (or knobs-into-holes): One mechanism for Fc heterodimerization is generally referred to in the art as “knobs and holes”, or “knob-in-holes”, or “knobs-into-holes”. These terms refer to amino acid mutations that create steric influences to favor formation of Fc heterodimers over Fc homodimers, as described in, e.g., Ridgway et al., 1996, Protein Engineering 9(7):617; Atwell et al., 1997, J. Mol. Biol. 270:26; and U.S. Pat. No. 8,216,805. Knob-in-hole mutations can be combined with other strategies to improve heterodimerization, for example as described in Section 7.2.2.1.6.

[0145] Monoclonal Antibody: The term “monoclonal antibody” as used herein refers to polypeptides, including antibodies, antibody fragments, molecules (including MBMs), etc. that are derived from the same genetic source.

[0146] Monovalent: The term “monovalent” as used herein in the context of an antigen-binding molecule refers to an antigen-binding molecule that has a single antigen-binding domain.

[0147] Multispecific binding molecules: The term “multispecific binding molecules” or “MBMs” refers to molecules that specifically bind to at least two antigens and comprise two or more antigen-binding domains. The antigen-binding domains can each independently be an antibody fragment (e.g., scFv, Fab, nanobody), a ligand, or a non-antibody derived binder (e.g., fibronectin, Fynomer, DARPin).

[0148] Mutation or modification: In the context of the primary amino acid sequence of a polypeptide, the terms “modification” and “mutation” refer to an amino acid substitution, insertion, and/or deletion in the polypeptide sequence relative to a reference polypeptide. Additionally, the term “modification” further encompasses an alteration to an amino acid residue, for example by chemical conjugation (e.g., of a drug or polyethylene glycol moiety) or post-translational modification (e.g., glycosylation).

[0149] Nucleic Acid: The term “nucleic acid” is used herein interchangeably with the term “polynucleotide” and refers to deoxyribonucleotides or ribonucleotides and polymers thereof in either single- or double-stranded form. The term encompasses nucleic acids containing known nucleotide analogs or modified backbone residues or linkages, which are synthetic, naturally occurring, and non-naturally occurring, which have similar binding properties as the reference nucleic acid, and which are metabolized in a manner similar to the reference nucleotides. Examples of such analogs include, without limitation, phosphorothioates, phosphoramidates, methyl phosphonates, chiral-methyl phosphonates, 2-O-methyl ribonucleotides, and peptide-nucleic acids (PNAs).

[0150] Unless otherwise indicated, a particular nucleic acid sequence also implicitly encompasses conservatively modified variants thereof (e.g., degenerate codon substitutions) and complementary sequences, as well as the sequence explicitly indicated. Specifically, as detailed below, degenerate codon substitutions can be achieved by generating sequences in which the third position of one or more selected (or all) codons is substituted with mixed-base and/or deoxyinosine residues (Batzer et al., 1991, Nucleic Acid Res. 19:5081; Ohtsuka et al., 1985, J. Biol. Chem. 260:2605-2608; and Rossolini et al., 1994, Mol. Cell. Probes 8:91-98).

[0151] Operably linked: The term “operably linked” refers to a functional relationship between two or more peptide or polypeptide domains or nucleic acid (e.g., DNA) segments. In the context of a fusion protein or other polypeptide, the term “operably linked” means that two or more amino acid segments are linked so as to produce a functional polypeptide. For example, in the context of an antigen-binding molecule, separate ABMs (or chains of an ABM) can be operably linked through peptide linker sequences. In the context of a nucleic acid encoding a fusion protein, such as a polypeptide chain of an antigen-binding molecule, “operably linked” means that the two nucleic acids are joined such that the amino acid sequences encoded by the two nucleic acids remain in-frame. In the context of transcriptional regulation, the term refers to the functional relationship of a transcriptional regulatory sequence to a transcribed sequence. For example, a promoter or enhancer sequence is operably linked to a coding sequence if it stimulates or modulates the transcription of the coding sequence in an appropriate host cell or other expression system.

[0152] Pentavalent: The term “pentavalent” as used herein in the context of an antigen-binding molecule (e.g., a TBM) refers to an antigen-binding molecule that has five antigen-binding domains. Pentavalent TBMs of the disclosure generally have either (a) two pairs of antigen-binding domains that each bind to the same antigen and a single antigen-binding domain that binds to the third antigen or (b) three antigen-binding domains that bind to the same antigen and two antigen-binding domains that each bind to a separate antigen. An example of a pentavalent TBM is shown schematically in FIG. 1T.

[0153] Polypeptide and Protein: The terms “polypeptide” and “protein” are used interchangeably herein to refer to a polymer of amino acid residues. The terms encompass amino acid polymers in which one or more amino acid residue is an artificial chemical mimetic of a corresponding naturally occurring amino acid, as well as to naturally occurring amino acid polymers and non-naturally occurring amino acid polymer. Additionally, the terms encompass amino acid polymers that are derivatized, for example, by synthetic derivatization of one or more side chains or termini, glycosylation, PEGylation, circular permutation, cyclization, linkers to other molecules, fusion to proteins or protein domains, and addition of peptide tags or labels.

[0154] Recognize: The term “recognize” as used herein refers to an ABM that finds and interacts (e.g., binds) with its epitope.

[0155] Sequence identity: Sequence identity between two similar sequences (e.g., antibody variable domains) can be measured by algorithms such as that of Smith, T. F. & Waterman, M. S. (1981) “Comparison Of Biosequences,” Adv. Appl. Math. 2:482 [local homology algorithm]; Needleman, S. B. & Wunsch, CD. (1970) “A General Method Applicable To The Search For Similarities In The Amino Acid Sequence Of Two Proteins,” J. Mol. Biol. 48:443 [homology alignment algorithm], Pearson, W. R. & Lipman, D. J. (1988) “Improved Tools For Biological Sequence Comparison,” Proc. Natl. Acad. Sci. (U.S.A.) 85:2444 [search for similarity method]; or Altschul, S. F. et al, 1990, “Basic Local Alignment Search Tool,” J. Mol. Biol. 215:403-10, the “BLAST” algorithm, see blast.ncbi.nlm.nih.gov/Blast.cgi. When using any of the aforementioned algorithms, the default parameters (for Window length, gap penalty, etc.) are used. In one embodiment, sequence identity is done using the BLAST algorithm, using default parameters.

[0156] Optionally, the identity is determined over a region that is at least about 50 nucleotides (or, in the case of a peptide or polypeptide, at least about 10 amino acids) in length, or in some cases over a region that is 100 to 500 or 1000 or more nucleotides (or 20, 50, 200 or more amino acids) in length. In some embodiments, the identity is determined over a defined domain, e.g., the VH or VL of an antibody. Unless specified otherwise, the sequence identity between two sequences is determined over the entire length of the shorter of the two sequences.

[0157] Single Chain Fab or scFab: The terms “single chain Fab” and “scFab” mean a polypeptide comprising an antibody heavy chain variable domain (VH), an antibody constant domain 1 (CH1), an antibody light chain variable domain (VL), an antibody light chain constant domain (CL) and a linker, such that the VH and VL are in association with one another and the CH1 and CL are in association with one another. In some embodiments, the antibody domains and the linker have one of the following orders in N-terminal to C-terminal direction: a) VH—CH1-linker-VL-CL, b) VL-CL-linker-VH—CH1, c) VH-CL-linker-VL-CH1 or d) VL-CH1-linker-VH-CL. The linker can be a polypeptide of at least 30 amino acids, for example between 32 and 50 amino acids. The single chain Fabs are stabilized via the natural disulfide bond between the CL domain and the CH1 domain.

[0158] Single Chain Fv or scFv: The term “single-chain Fv” or “scFv” as used herein refers to antibody fragments that comprise the VH and VL domains of an antibody, where these domains are present in a single polypeptide chain. The Fv polypeptide can further comprise a polypeptide linker between the VH and VL domains which enables the scFv to form the desired structure for antigen-binding. For a review of scFv see Plückthun in The Pharmacology of Monoclonal Antibodies, vol. 113, Rosenburg and Moore eds., 1994, Springer-Verlag, New York, pp. 269-315.

[0159] Specifically (or selectively) binds: The term “specifically (or selectively) binds” to an antigen or an epitope refers to a binding reaction that is determinative of the presence of a cognate antigen or an epitope in a heterogeneous population of proteins and other biologics. The binding reaction can be but need not be mediated by an antibody or antibody fragment, but can also be mediated by, for example, any type of ABM described in Section 7.2.1, such as a ligand, a DARPin, etc. An ABM typically also has a dissociation rate constant (KD) (koff/kon) of less than 5×10⁻²M, less than 10⁻²M, less than 5×10⁻³M, less than 10⁻³M, less than 5×10⁻⁴M, less than 10⁻⁴M, less than 5×10⁻⁵M, less than 10⁻⁵M, less than 5×10⁻⁶M, less than 10⁻⁶M, less than 5×10⁻⁷M, less than 10⁻⁷M, less than 5×10⁻⁸M, less than 10⁻⁸M, less than 5×10⁻⁹M, or less than 10⁻⁹M, and binds to the target antigen with an affinity that is at least two-fold greater than its affinity for binding to a non-specific antigen (e.g., HSA). Binding affinity can be measured using a Biacore, SPR or BLI assay. The term “specifically binds” does not exclude cross-species reactivity. For example, an antigen-binding module (e.g., an antigen-binding fragment of an antibody) that “specifically binds” to an antigen from one species can also “specifically bind” to that antigen in one or more other species. Thus, such cross-species reactivity does not itself alter the classification of an antigen-binding module as a “specific” binder. In certain embodiments, an antigen-binding module that specifically binds to a human antigen has cross-species reactivity with one or more non-human mammalian species, e.g., a primate species (including but not limited to one or more of Macaca fascicularis, Macaca mulatta, and Macaca nemestrina) or a rodent species, e.g., Mus musculus. In other embodiments, the antigen-binding module does not have cross-species reactivity.

[0160] Subject: The term “subject” includes human and non-human animals. Non-human animals include all vertebrates, e.g., mammals and non-mammals, such as non-human primates, sheep, dog, cow, chickens, amphibians, and reptiles. Except when noted, the terms “patient” or “subject” are used herein interchangeably.

[0161] Tandem of VH Domains: The term “a tandem of VH domains (or VHs)” as used herein refers to a string of VH domains, consisting of multiple numbers of identical VH domains of an antibody. Each of the VH domains, except the last one at the end of the tandem, has its C-terminus connected to the N-terminus of another VH domain with or without a linker. A tandem has at least 2 VH domains, and in particular embodiments an antigen-binding molecule has 3, 4, 5, 6, 7, 8, 9, or 10 VH domains. The tandem of VH can be produced by joining the encoding nucleic acids of each VH domain in a desired order using recombinant methods with or without a linker (e.g., as described in Section 7.2.2.3) that enables them to be made as a single polypeptide chain. The N-terminus of the first VH domain in the tandem is defined as the N-terminus of the tandem, while the C-terminus of the last VH domain in the tandem is defined as the C-terminus of the tandem.

[0162] Tandem of VL Domains: The term “a tandem of VL domains (or VLs)” as used herein refers to a string of VL domains, consisting of multiple numbers of identical VL domains of an antibody. Each of the VL domains, except the last one at the end of the tandem, has its C-terminus connected to the N-terminus of another VL with or without a linker. A tandem has at least 2 VL domains, and in particular embodiments an antigen-binding molecule has 3, 4, 5, 6, 7, 8, 9, or 10 VL domains. The tandem of VL can be produced by joining the encoding nucleic acids of each VL domain in a desired order using recombinant methods with or without a linker (e.g., as described in Section 7.2.2.3) that enables them to be made as a single polypeptide chain. The N-terminus of the first VL domain in the tandem is defined as the N-terminus of the tandem, while the C-terminus of the last VL domain in the tandem is defined as the C-terminus of the tandem.

[0163] Target Antigen: By “target antigen” as used herein is meant the molecule that is bound non-covalently, reversibly and specifically by an antigen binding domain.

[0164] Tetravalent: The term “tetravalent” as used herein in the context of an antigen-binding molecule (e.g., a BBM or TBM) refers to an antigen-binding molecule that has four antigen-binding domains. Tetravalent TBMs of the disclosure generally have two antigen-binding domains that bind to the same antigen (e.g., CD19) and two antigen-binding domains that each bind to a separate antigen (e.g., a component of a TCR complex and either CD2 or a TAA). Examples of tetravalent BBMs are shown schematically in FIGS. 1AA-1AH and examples of tetravalent TBMs are shown schematically in FIGS. 2Q-2S.

[0165] Therapeutically effective amount: A “therapeutically effective amount” refers to an amount effective, at dosages and for periods of time necessary, to achieve a desired therapeutic result.

[0166] Treat, Treatment, Treating: As used herein, the terms “treat”, “treatment” and “treating” refer to the reduction or amelioration of the progression, severity and/or duration of a disease or disorder (e.g., a B cell malignancy), or the amelioration of the progression, severity and/or duration one or more symptoms (e.g., one or more discernible symptoms) of a disorder (e.g., CRS) resulting from the administration of one or more anti-CD19 agents. In some embodiments, the terms “treat”, “treatment” and “treating” refer to the amelioration of at least one measurable physical parameter of a disorder, such as growth of a tumor, not necessarily discernible by the patient. In other embodiments the terms “treat”, “treatment” and “treating” refer to the inhibition of the progression of a disorder, either physically by, e.g., stabilization of a discernible symptom, physiologically by, e.g., stabilization of a physical parameter, or both. In some embodiments, the terms “treat”, “treatment” and “treating” can refer to the reduction or stabilization of tumor size or cancerous cell count.

[0167] Trispecific binding molecules: The term “trispecific binding molecules” or “TBMs” refers to molecules that specifically bind to three antigens and comprise three or more antigen-binding domains. The TBMs of the disclosure comprise at least one antigen-binding domain which is specific for CD19, at least one antigen-binding domain which is specific for a component of a TCR complex, and at least one antigen-binding domain which is specific for CD2 or a TAA. The antigen-binding domains can each independently be an antibody fragment (e.g., scFv, Fab, nanobody), a ligand, or a non-antibody derived binder (e.g., fibronectin, Fynomer, DARPin). Representative TBMs are illustrated in FIG. 1. TBMs can comprise one, two, three, four or even more polypeptide chains. For example, the TBM illustrated in FIG. 1M comprises a single polypeptide chain comprising three scFvs connected by ABM linkers one a single polypeptide chain. The TBM illustrated in FIG. 1K comprises two polypeptide chains comprising three scFvs connected by, inter alia, an Fc domain. The TBM illustrated in FIG. 1J comprises three polypeptide chains forming an scFv, a ligand, and a Fab connected by, inter alia, an Fc domain. The TBM illustrated in FIG. 1C comprises four polypeptide chains forming three Fabs connected by, inter alia, an Fc domain. The TBM illustrated in FIG. 1U comprises 6 polypeptide chains forming four Fabs and two scFvs connected by, inter alia, an Fc domain.

[0168] Trivalent: The term “trivalent” as used herein in the context of an antigen-binding molecule (e.g., a MBM) refers to an antigen-binding molecule that has three antigen-binding domains. The MBMs of the disclosure are typically bispecific or trispecific. Bispecific BBMs specifically bind to CD19 and a component of a TCR complex. Trispecific TBMs specifically bind to CD19, a component of a TCR complex, and CD2 or a TAA. Accordingly, the trivalent BBMs have three antigen binding domains, two of which bind to CD19 and one of which binds to a component of the TCR, or vice versa. TBMs have three antigen-binding domains that each bind to a different antigen. Examples of trivalent BBMs are shown schematically in FIGS. 1G-1Z and examples of trivalent TBMs are shown schematically in FIGS. 2B-2V.

[0169] Tumor: The term “tumor” is used interchangeably with the term “cancer” herein, e.g., both terms encompass liquid, e.g., diffuse or circulating, tumors.

[0170] Tumor-Associated Antigen: The term “tumor-associated antigen” or “TAA” refers to a molecule (typically a protein, carbohydrate, lipid or some combination thereof) that is expressed on the surface of a cancer cell, either entirely or as a fragment (e.g., MHC/peptide), and which is useful for the preferential targeting of a pharmacological agent to the cancer cell. In some embodiments, a TAA is a marker expressed by both normal cells and cancer cells, e.g., a lineage marker, e.g., CD19 on B cells. In some embodiments, a TAA is a cell surface molecule that is overexpressed in a cancer cell in comparison to a normal cell, for instance, 1-fold over expression, 2-fold overexpression, 3-fold overexpression or more in comparison to a normal cell. In some embodiments, a TAA is a cell surface molecule that is inappropriately synthesized in the cancer cell, for instance, a molecule that contains deletions, additions or mutations in comparison to the molecule expressed on a normal cell. In some embodiments, a TAA will be expressed exclusively on the cell surface of a cancer cell, entirely or as a fragment (e.g., MHC/peptide), and not synthesized or expressed on the surface of a normal cell. Accordingly, the term “TAA” encompasses antigens that are specific to cancer cells, sometimes referred to as tumor-specific antigens (“TSAs”). Although CD19 has features of a tumor-associated antigen, the terms “tumor-associated antigen” and “TAA” are used throughout the disclosure to refer to molecules other than CD19.

[0171] Variable region: By “variable region” or “variable domain” as used herein is meant the region of an immunoglobulin that comprises one or more Ig domains substantially encoded by any of the Vκ, Vλ, and/or VH genes that make up the kappa, lambda, and heavy chain immunoglobulin genetic loci respectively, and contains the CDRs that confer antigen specificity. A “variable heavy domain” can pair with a “variable light domain” to form an antigen binding domain (“ABD”) or antigen-binding module (“ABM”). In addition, each variable domain comprises three hypervariable regions (“complementary determining regions,” “CDRs”) (CDR-H1, CDR-H2, CDR-H3 for the variable heavy domain and CDR-L1, CDR-L2, CDR-L3 for the variable light domain) and four framework (FR) regions, arranged from amino-terminus to carboxy-terminus in the following order: FR1-CDR1-FR2-CDR2-FR3-CDR3-FR4.

[0172] Vector: The term “vector” is intended to refer to a polynucleotide molecule capable of transporting another polynucleotide to which it has been linked. One type of vector is a “plasmid”, which refers to a circular double stranded DNA loop into which additional DNA segments can be ligated. Another type of vector is a viral vector, where additional DNA segments can be ligated into the viral genome. Certain vectors are capable of autonomous replication in a host cell into which they are introduced (e.g., bacterial vectors having a bacterial origin of replication and episomal mammalian vectors). Other vectors (e.g., non-episomal mammalian vectors) can be integrated into the genome of a host cell upon introduction into the host cell, and thereby are replicated along with the host genome. Moreover, certain vectors are capable of directing the expression of genes to which they are operably linked. Such vectors are referred to herein as “recombinant expression vectors” (or simply, “expression vectors”). In general, expression vectors of utility in recombinant DNA techniques are often in the form of plasmids. In the present specification, “plasmid” and “vector” can be used interchangeably as the plasmid is the most commonly used form of vector. However, the disclosure is intended to include such other forms of expression vectors, such as viral vectors (e.g., replication defective retroviruses, adenoviruses and adeno-associated viruses), which serve equivalent functions.

[0173] VH: The term “VH” refers to the variable region of an immunoglobulin heavy chain of an antibody, including the heavy chain of an Fv, scFv, dsFv or Fab.

[0174] VL: The term “VL” refers to the variable region of an immunoglobulin light chain, including the light chain of an Fv, scFv, dsFv or Fab.

[0175] VH-VL or VH-VL Pair: In reference to a VH-VL pair, whether on the same polypeptide chain or on different polypeptide chains, the terms “VH-VL” and “VH-VL pair” are used for convenience and are not intended to convey any particular orientation, unless the context dictates otherwise. Thus, a scFv comprising a “VH-VL” or “VH-VL pair” can have the VH and VL domains in any orientation, for example the VH N-terminal to the VL or the VL N-terminal to the VH.

### 7.2. Monospecific and Multispecific CD19 Binding Molecules

[0176] In some aspects, the anti-CD19 agents used in the methods and combinations of the disclosure are monospecific molecules that bind to human CD19. For example, the monospecific binding molecule can be an antibody or an antigen-binding fragment thereof (e.g., an antibody fragment, an scFv, a dsFv, a Fv, a Fab, an scFab, a (Fab′)2, or a single domain antibody (SDAB). Alternatively, the CD19 binding molecules can be multispecific molecules, for example bispecific or trispecific binding molecules.

[0177] In some embodiments, the CD19 binding molecules are chimeric or humanized monoclonal antibodies. Chimeric and/or humanized antibodies, can be engineered to minimize the immune response by a human patient to antibodies produced in non-human subjects or derived from the expression of non-human antibody genes. Chimeric antibodies comprise a non-human animal antibody variable region and a human antibody constant region. Such antibodies retain the epitope binding specificity of the original monoclonal antibody, but can be less immunogenic when administered to humans, and therefore more likely to be tolerated by the patient. For example, one or all (e.g., one, two, or three) of the variable regions of the light chain(s) and/or one or all (e.g., one, two, or three) of the variable regions the heavy chain(s) of a mouse antibody (e.g., a mouse monoclonal antibody) can each be joined to a human constant region, such as, without limitation an IgG1 human constant region. Chimeric monoclonal antibodies can be produced by known recombinant DNA techniques. For example, a gene encoding the constant region of a non-human antibody molecule can be substituted with a gene encoding a human constant region (see Robinson et al., PCT Patent Publication PCT/US86/02269; Akira, et al., European Patent Application 184,187; or Taniguchi, M., European Patent Application 171,496). In addition, other suitable techniques that can be used to generate chimeric antibodies are described, for example, in U.S. Pat. Nos. 4,816,567; 4,978,775; 4,975,369; and 4,816,397.

[0178] Chimeric or humanized antibodies and antigen binding fragments thereof can be prepared based on the sequence of a murine monoclonal antibody. DNA encoding the heavy and light chain immunoglobulins can be obtained from a murine hybridoma of interest and engineered to contain non-murine (e.g., human) immunoglobulin sequences using standard molecular biology techniques. For example, to create a chimeric antibody, the murine variable regions can be linked to human constant regions using known methods (see e.g., U.S. Pat. No. 4,816,567 to Cabilly et al.). To create a humanized antibody, the murine CDR regions can be inserted into a human framework using known methods. See e.g., U.S. Pat. No. 5,225,539 to Winter, and U.S. Pat. Nos. 5,530,101; 5,585,089; 5,693,762 and 6,180,370 to Queen et al.

[0179] A humanized antibody can be produced using a variety of known techniques, including but not limited to, CDR-grafting (see, e.g., European Patent No. EP 239,400; International Publication No. WO 91/09967; and U.S. Pat. Nos. 5,225,539, 5,530,101, and 5,585,089), veneering or resurfacing (see, e.g., European Patent Nos. EP 592,106 and EP 519,596; Padlan, 1991, Molecular Immunology, 28(4/5):489-498; Studnicka et al., 1994, Protein Engineering, 7(6):805-814; and Roguska et al., 1994, PNAS, 91:969-973), chain shuffling (see, e.g., U.S. Pat. No. 5,565,332), and techniques disclosed in, e.g., U.S. Patent Application Publication No. US2005/0042664, U.S. Patent Application Publication No. US2005/0048617, U.S. Pat. Nos. 6,407,213, 5,766,886, International Publication No. WO 9317105, Tan et al., J. Immunol., 169:1119-25 (2002), Caldas et al., Protein Eng., 13(5):353-60 (2000), Morea et al., Methods, 20(3):267-79 (2000), Baca et al., J. Biol. Chem., 272(16):10678-84 (1997), Roguska et al., Protein Eng., 9(10):895-904 (1996), Couto et al., Cancer Res., 55 (23 Supp):5973s-5977s (1995), Couto et al., Cancer Res., 55(8):1717-22 (1995), Sandhu J S, Gene, 150(2):409-10 (1994), and Pedersen et al., J. Mol. Biol., 235(3):959-73 (1994). Often, framework residues in the framework regions will be substituted with the corresponding residue from the CDR donor antibody to alter, for example improve, antigen binding. These framework substitutions, e.g., conservative substitutions are identified by known methods, e.g., by modeling of the interactions of the CDR and framework residues to identify framework residues important for antigen binding and sequence comparison to identify unusual framework residues at particular positions. (See, e.g., Queen et al., U.S. Pat. No. 5,585,089; and Riechmann et al., 1988, Nature, 332:323).

[0180] As provided herein, humanized antibodies or antibody fragments can comprise one or more CDRs from nonhuman immunoglobulin molecules and framework regions where the amino acid residues comprising the framework are derived completely or mostly from human germline. Multiple techniques for humanization of antibodies or antibody fragments are well-known and can essentially be performed following the method of Winter and co-workers (Jones et al., Nature, 321:522-525 (1986); Riechmann et al., Nature, 332:323-327 (1988); Verhoeyen et al., Science, 239:1534-1536 (1988)), by substituting rodent CDRs or CDR sequences for the corresponding sequences of a human antibody, i.e., CDR-grafting (EP 239,400; PCT Publication No. WO 91/09967; and U.S. Pat. Nos. 4,816,567; 6,331,415; 5,225,539; 5,530,101; 5,585,089; 6,548,640). In such humanized antibodies and antibody fragments, substantially less than an intact human variable domain has been substituted by the corresponding sequence from a nonhuman species. Humanized antibodies are often human antibodies in which some CDR residues and possibly some framework (FR) residues are substituted by residues from analogous sites in rodent antibodies. Humanization of antibodies and antibody fragments can also be achieved by veneering or resurfacing (EP 592,106; EP 519,596; Padlan, 1991, Molecular Immunology, 28(4/5):489-498; Studnicka et al., Protein Engineering, 7(6):805-814 (1994); and Roguska et al., PNAS, 91:969-973 (1994)) or chain shuffling (U.S. Pat. No. 5,565,332).

[0181] The choice of human variable domains, both light and heavy, to be used in making the humanized antibodies is to reduce antigenicity. According to the so-called “best-fit” method, the sequence of the variable domain of a rodent antibody is screened against the entire library of known human variable-domain sequences. The human sequence which is closest to that of the rodent is then accepted as the human framework (FR) for the humanized antibody (Sims et al., J. Immunol., 151:2296 (1993); Chothia et al., J. Mol. Biol., 196:901 (1987)). Another method uses a particular framework derived from the consensus sequence of all human antibodies of a particular subgroup of light or heavy chains. The same framework can be used for several different humanized antibodies (see, e.g., Nicholson et al. Mol. Immun. 34 (16-17): 1157-1165 (1997); Carter et al., Proc. Natl. Acad. Sci. USA, 89:4285 (1992); Presta et al., J. Immunol., 151:2623 (1993). In some embodiments, the framework region, e.g., all four framework regions, of the heavy chain variable region are derived from a VH4_4-59 germline sequence. In one embodiment, the framework region can comprise, one, two, three, four or five modifications, e.g., substitutions, e.g., conservative substitutions, e.g., from the amino acid at the corresponding murine sequence. In one embodiment, the framework region, e.g., all four framework regions of the light chain variable region are derived from a VK3_1.25 germline sequence. In one embodiment, the framework region can comprise, one, two, three, four or five modifications, e.g., substitutions, e.g., conservative substitutions, e.g., from the amino acid at the corresponding murine sequence.

[0182] In certain embodiments, the CD19 binding molecules comprise a heavy chain variable region from a particular germline heavy chain immunoglobulin gene and/or a light chain variable region from a particular germline light chain immunoglobulin gene. For example, such antibodies can comprise or consist of a human antibody comprising heavy or light chain variable regions that are “the product of” or “derived from” a particular germline sequence. A human antibody that is “the product of” or “derived from” a human germline immunoglobulin sequence can be identified as such by comparing the amino acid sequence of the human antibody to the amino acid sequences of human germline immunoglobulins and selecting the human germline immunoglobulin sequence that is closest in sequence (i.e., greatest % identity) to the sequence of the human antibody (using the methods outlined herein). A human antibody that is “the product of” or “derived from” a particular human germline immunoglobulin sequence can contain amino acid differences as compared to the germline sequence, due to, for example, naturally-occurring somatic mutations or intentional introduction of site-directed mutation. However, a humanized antibody typically is at least 90% identical in amino acids sequence to an amino acid sequence encoded by a human germline immunoglobulin gene and contains amino acid residues that identify the antibody as being derived from human sequences when compared to the germline immunoglobulin amino acid sequences of other species (e.g., murine germline sequences). In certain cases, a humanized antibody can be at least 95, 96, 97, 98 or 99%, or even at least 96%, 97%, 98%, or 99% identical in amino acid sequence to the amino acid sequence encoded by the germline immunoglobulin gene. Typically, a humanized antibody derived from a particular human germline sequence will display no more than 10-20 amino acid differences from the amino acid sequence encoded by the human germline immunoglobulin gene (prior to the introduction of any skew, pl and ablation variants herein; that is, the number of variants is generally low, prior to the introduction of the variants of the disclosure). In certain cases, the humanized antibody can display no more than 5, or even no more than 4, 3, 2, or 1 amino acid difference from the amino acid sequence encoded by the germline immunoglobulin gene (again, prior to the introduction of any skew, pl and ablation variants herein; that is, the number of variants is generally low, prior to the introduction of the variants of the disclosure).

[0183] In one embodiment, the parent antibody has been affinity matured. Structure-based methods can be employed for humanization and affinity maturation, for example as described in U.S. Ser. No. 11/004,590. Selection based methods can be employed to humanize and/or affinity mature antibody variable regions, including but not limited to methods described in Wu et al., 1999, J. Mol. Biol. 294:151-162; Baca et al., 1997, J. Biol. Chem. 272(16):10678-10684; Rosok et al., 1996, J. Biol. Chem. 271(37): 22611-22618; Rader et al., 1998, Proc. Natl. Acad. Sci. USA 95: 8910-8915; Krauss et al., 2003, Protein Engineering 16(10):753-759. Other humanization methods can involve the grafting of only parts of the CDRs, including but not limited to methods described in U.S. Ser. No. 09/810,510; Tan et al., 2002, J. Immunol. 169:1119-1125; De Pascalis et al., 2002, J. Immunol. 169:3076-3084.

[0184] In some embodiments, the CD19 binding molecule comprises an ABM which is a Fab. Fab domains can be produced by proteolytic cleavage of immunoglobulin molecules, using enzymes such as papain, or through recombinant expression. Fab domains typically comprise a CH1 domain attached to a VH domain which pairs with a CL domain attached to a VL domain. In a wild-type immunoglobulin, the VH domain is paired with the VL domain to constitute the Fv region, and the CH1 domain is paired with the CL domain to further stabilize the binding module. A disulfide bond between the two constant domains can further stabilize the Fab domain.

[0185] In some embodiments, the CD19 binding molecule comprises an ABM which is a scFab. In an embodiment, the antibody domains and the linker in the scFab fragment have one of the following orders in N-terminal to C-terminal direction: a) VH—CH1-linker-VL-CL, or b) VL-CL-linker-VH—CH1. In some cases, VL-CL-linker-VH—CH1 is used.

[0186] In another embodiment, the antibody domains and the linker in the scFab fragment have one of the following orders in N-terminal to C-terminal direction: a) VH-CL-linker-VL-CH1 or b) VL-CH1-linker-VH-CL.

[0187] Optionally in the scFab fragment, additionally to the natural disulfide bond between the CL-domain and the CH1 domain, also the antibody heavy chain variable domain (VH) and the antibody light chain variable domain (VL) are disulfide stabilized by introduction of a disulfide bond between the following positions: i) heavy chain variable domain position 44 to light chain variable domain position 100, ii) heavy chain variable domain position 105 to light chain variable domain position 43, or iii) heavy chain variable domain position 101 to light chain variable domain position 100 (numbering according to EU index of Kabat).

[0188] Such further disulfide stabilization of scFab fragments is achieved by the introduction of a disulfide bond between the variable domains VH and VL of the single chain Fab fragments. Techniques to introduce unnatural disulfide bridges for stabilization for a single chain Fv are described e.g. in WO 94/029350, Rajagopal et al., 1997, Prot. Engin. 10:1453-59; Kobayashi et al., 1998, Nuclear Medicine & Biology, 25:387-393; and Schmidt, et al., 1999, Oncogene 18:1711-1721. In one embodiment, the optional disulfide bond between the variable domains of the scFab fragments is between heavy chain variable domain position 44 and light chain variable domain position 100. In one embodiment, the optional disulfide bond between the variable domains of the scFab fragments is between heavy chain variable domain position 105 and light chain variable domain position 43 (numbering according to EU index of Kabat).

[0189] In some embodiments, the CD19 binding molecule comprises an ABM which is a scFv. Single chain Fv antibody fragments comprise the VH and VL domains of an antibody in a single polypeptide chain, are capable of being expressed as a single chain polypeptide, and retain the specificity of the intact antibody from which it is derived. Generally, the scFv polypeptide further comprises a polypeptide linker between the VH and VL domain that enables the scFv to form the desired structure for target binding. Examples of linkers suitable for connecting the VH and VL chains of an scFV are the ABM linkers identified in Section 7.2.2.3, for example any of the linkers designated L1 through L58.

[0190] Unless specified, as used herein an scFv can have the VL and VH variable regions in either order, e.g., with respect to the N-terminal and C-terminal ends of the polypeptide, the scFv can comprise VL-linker-VH or can comprise VH-linker-VL.

[0191] To create an scFv-encoding nucleic acid, the VH and VL-encoding DNA fragments are operably linked to another fragment encoding a linker, e.g., encoding any of the linkers described in Section 7.2.2.3 (such as the amino acid sequence (Gly4″Ser)3 (SEQ ID NO: 1174)), such that the VH and VL sequences can be expressed as a contiguous single-chain protein, with the VL and VH regions joined by the flexible linker (see e.g., Bird et al., 1988, Science 242:423-426; Huston et al., 1988, Proc. Natl. Acad. Sci. USA 85:5879-5883; McCafferty et al., 1990, Nature 348:552-554).

[0192] CD19 binding molecules can also comprise an ABM which is a Fv, a dsFv, a (Fab′)2, a single domain antibody (SDAB), a VH or VL domain, or a camelid VHH domain (also called a nanobody).

[0193] CD19 binding molecules can comprise a single domain antibody composed of a single VH or VL domain which exhibits sufficient affinity to CD19. In an embodiment, the single domain antibody is a camelid VHH domain (see, e.g., Riechmann, 1999, Journal of Immunological Methods 231:25-38; WO 94/04678).

[0194] Tables 1A to 1C (collectively “Table 1”) list the sequences of exemplary CD19 binding sequences that can be included in CD19 binding molecules.

[0195] The sequences set forth in Table 1A are based on the CD19 antibody NEG258.

TABLE 1A
NEG258-Based Binder Sequences

| | | | SEQ |
|---|---|---|---|
| Chain | Portion | Sequence | ID NO: |
| NEG258_VH | CDR-H1 | GYTFTTYWIQ | 1 |
| | (Combined) | | |
| | CDR-H2 | AVYPGDADTRYTQKFQG | 2 |
| | (Combined) | | |
| | CDR-H3 | DAGLEYYALDY | 3 |
| | (Combined) | | |
| | CDR-H1 (Kabat) | TYWIQ | 4 |
| | CDR-H2 (Kabat) | AVYPGDADTRYTQKFQG | 5 |
| | CDR-H3 (Kabat) | DAGLEYYALDY | 6 |
| | CDR-H1 (Chothia) | GYTFTTY | 7 |
| | CDR-H2 (Chothia) | YPGDAD | 8 |
| | CDR-H3 (Chothia) | DAGLEYYALDY | 9 |
| | CDR-H1 (IMGT) | GYTFTTYW | 10 |
| | CDR-H2 (IMGT) | VYPGDADT | 11 |
| | CDR-H3 (IMGT) | GRDAGLEYYALDY | 12 |
| | VH | QVQLVQSGAEVKKPGASVKVSCKASGYTFTTYW | 13 |
| | | IQWVRQAPGQRLEWMGAVYPGDADTRYTQKFQG | |
| | | RVTLTADRSASTAYMELSSLRSEDTAVYYCGRD | |
| | | AGLEYYALDYWGQGTLVTVSS | |
| NEG258_VL | CDR-L1 | RASQDVGTAVA | 14 |
| | (Combined) | | |
| | CDR-L2 | WASTRHT | 15 |
| | (Combined) | | |
| | CDR-L3 | QQYANFPLYT | 16 |
| | (Combined) | | |
| | CDR-L1 (Kabat) | RASQDVGTAVA | 17 |
| | CDR-L2 (Kabat) | WASTRHT | 18 |
| | CDR-L3 (Kabat) | QQYANFPLYT | 19 |
| | CDR-L1 (Chothia) | SQDVGTA | 20 |
| | CDR-L2 (Chothia) | WAS | 21 |
| | CDR-L3 (Chothia) | YANFPLY | 22 |
| | CDR-L1 (IMGT) | QDVGTA | 23 |
| | CDR-L2 (IMGT) | WAS | 24 |
| | CDR-L3 (IMGT) | QQYANFPLYT | 25 |
| | VL | EIVMTQSPATLSVSPGERATLSCRASQDVGTAV | 26 |
| | | AWYQQKPGQAPRLLIYWASTRHTGIPARFSGSG | |
| | | SGTEFTLTISSLQSEDFAVYFCQQYANFPLYTF | |
| | | GQGTKLEIK | |

[0196] In some embodiments, a CD19 binding molecule comprises CDR-L1, CDR-L-2, CDR-L-3, CDR-H1, CDR-H-2 and CDR-H-3 sequences of NEG258 as set forth in Table 1A. The CDR-L1, CDR-L-2, CDR-L-3, CDR-H1, CDR-H-2 and CDR-H-3 sequences can be as defined by Kabat (SEQ ID NOs:17-19 and 4-6, respectively), Chothia (SEQ ID NOs:20-22 and 7-9, respectively), or IMGT (SEQ ID NOs& 23-25 and 10-12, respectively), or the combined Chothia and Kabat CDR-L1, CDR-L-2, CDR-L-3, CDR-H1, CDR-H-2 and CDR-H-3 sequences (SEQ ID NOs:14-16 and 1-3, respectively). The CD19 binding molecule can also comprise a light chain variable sequence (SEQ ID NO:26) and/or heavy chain variable sequence (SEQ ID NO:13) of the anti-0019 antibody NEG258 as set forth in Table 1A.

[0197] The sequences set forth in Table 1B are based on the CD19 antibody NEG218.

TABLE 1B
NEG218-Based Sequences

| Chain | Portion | Sequence | SEQ ID NO: |
|---|---|---|---|
| NEG218_VH | CDR-H1 | GYSFTNYWMN | 27 |
| | (Combined) | | |
| | CDR-H2 | MIHPSDSEIRLNQKFQG | 28 |
| | (Combined) | | |
| | CDR-H3 | WYYLSSPMDY | 29 |
| | (Combined) | | |
| | CDR-H1 (Kabat) | NYWMN | 30 |
| | CDR-H2 (Kabat) | MIHPSDSEIRLNQKFQG | 31 |
| | CDR-H3 (Kabat) | WYYLSSPMDY | 32 |
| | CDR-H1 (Chothia) | GYSFTNY | 33 |
| | CDR-H2 (Chothia) | HPSDSE | 34 |
| | CDR-H3 (Chothia) | WYYLSSPMDY | 35 |
| | CDR-H1 (IMGT) | GYSFTNYW | 36 |
| | CDR-H2 (IMGT) | IHPSDSEI | 37 |
| | CDR-H3 (IMGT) | SRWYYLSSPMDY | 38 |
| | VH | EVQLVQSGAEVKKPGESLKISCKASGYSFTNYWMNWVRQ | 39 |
| | | MPGKGLEWMGMIHPSDSEIRLNQKFQGQVTLSVDKSIGTA | |
| | | YMQWSSLKASDTAMYYCSRWYYLSSPMDYWGQGTTVTV | |
| | | SS | |
| NEG218_VL | CDR-L1 | RASQDVGTAVA | 40 |
| | (Combined) | | |
| | CDR-L2 | WASTRHT | 41 |
| | (Combined) | | |
| | CDR-L3 | QQYSSYPYT | 42 |
| | (Combined) | | |
| | CDR-L1 (Kabat) | RASQDVGTAVA | 43 |
| | CDR-L2 (Kabat) | WASTRHT | 44 |
| | CDR-L3 (Kabat) | QQYSSYPYT | 45 |
| | CDR-L1 (Chothia) | SQDVGTA | 46 |
| | CDR-L2 (Chothia) | WAS | 47 |
| | CDR-L3 (Chothia) | YSSYPY | 48 |
| | CDR-L1 (IMGT) | QDVGTA | 49 |
| | CDR-L2 (IMGT) | WAS | 50 |
| | CDR-L3 (IMGT) | QQYSSYPYT | 51 |
| | VL | EIVMTQSPATLSVSPGERATLSCRASQDVGTAVAWYQQKP | 52 |
| | | GQAPRLLIYWASTRHTGIPARFSGSGSGTEFTLTISSLQSE | |
| | | DFAVYFCQQYSSYPYTFGQGTKLEIK | |

[0198] In some embodiments, a CD19 binding molecule comprises CDR-L1, CDR-L2, CDR-L3, CDR-H1, CDR-H2 and CDR-H3 sequences of NEG218 as set forth in Table 214. The CDR-L, CDR-L2, CDR-H3, CDR-H1, CDR-H2 and CDR-H3 sequences can be as defined by Kabat (SEQ ID NOs:43-45 and 30-32, respectively), Chothia (SEQ ID NOs:46-48 and 33-35, respectively), or IMGT (SEQ ID NOs:49-51 and 36-38, respectively), or the combined Chothia and Kabat CDR-L1, CDR-2, CDR-3, CR-H1, CDR-H2 and CDR-H3 sequences (SEQ ID NOs:40-42 and 27-29, respectively). The CD19 binding molecule can also comprise a light chain variable sequence (SEQ ID NO:52) and/or heavy chain variable sequence (SEQ ID NO:39) of the anti-CD9 antibody NEG218 as set forth in Table 1B.

[0199] Exemplary CD19 binding molecules having CDR sequences described in Table 1A and Table 1 B are provided in Table 20A-1 to Table 200.

[0200] Further exemplary CDR and variable domain sequences that can be incorporated into a CD19 binding molecule are set forth in Table 1C.

TABLE 1C
CD19 Binders

| | | | SEQ |
|---|---|---|---|
| | | | ID |
| Name | Domain | Sequence | NO: |
| CD19-H1 | CDR-H1 | DYGVS | 214 |
| CD19-H2A | CDR-H2 | VIWGSETTYYNSALKS | 114 |
| CD19-H2B | CDR-H2 | VIWGSETTYYSSSLKS | 115 |
| CD19-H2C | CDR-H2 | VIWGSETTYYQSSLKS | 116 |
| CD19-H2D | CDR-H2 | VIWGSETTYYNSSLKS | 117 |
| CD19-H3 | CDR-H3 | HYYYGGSYAMDY | 118 |
| CD19-L1 | CDR-L1 | RASQDISKYLN | 119 |
| CD19-L2 | CDR-L2 | HTSRLHS | 120 |
| CD19-L3 | CDR-L3 | QQGNTLPYT | 121 |
| CD19-VHA | VH | EVKLQESGPGLVAPSQSLSVTCTVSGVSLPDYGVSWI | 218 |
| | | RQPPRKGLEWLGVIWGSETTYYNSALKSRLTIIKDNSK | |
| | | SQVFLKMNSLQTDDTAIYYCAKHYYYGGSYAMDYWG | |
| | | QGTSVTVSS | |
| CD19-VHB | VH | QVQLQESGPGLVKPSETLSLTCTVSGVSLPDYGVSWI | 219 |
| | | RQPPGKGLEWIGVIWGSETTYYSSSLKSRVTISKDNSK | |
| | | NQVSLKLSSVTAADTAVYYCAKHYYYGGSYAMDYWG | |
| | | QGTLVTVSS | |
| CD19-VHC | VH | QVQLQESGPGLVKPSETLSLTCTVSGVSLPDYGVSWI | 220 |
| | | RQPPGKGLEWIGVIWGSETTYYQSSLKSRVTISKDNSK | |
| | | NQVSLKLSSVTAADTAVYYCAKHYYYGGSYAMDYWG | |
| | | QGTLVTVSS | |
| CD19-VHD | VH | QVQLQESGPGLVKPSETLSLTCTVSGVSLPDYGVSWI | 221 |
| | | RQPPGKGLEWIGVIWGSETTYYNSSLKSRVTISKDNSK | |
| | | NQVSLKLSSVTAADTAVYYCAKHYYYGGSYAMDYWG | |
| | | QGTLVTVSS | |
| CD19-VLA | VL | DIQMTQTTSSLSASLGDRVTISCRASQDISKYLNWYQQ | 222 |
| | | KPDGTVKLLIYHTSRLHSGVPSRFSGSGSGTDYSLTIS | |
| | | NLEQEDIATYFCQQGNTLPYTFGGGTKLEIT | |
| CD19-VLB | VL | EIVMTQSPATLSLSPGERATLSCRASQDISKYLNWYQQ | 223 |
| | | KPGQAPRLLIYHTSRLHSGIPARFSGSGSGTDYTLTISS | |
| | | LQPEDFAVYFCQQGNTLPYTFGQGTKLEIK | |
| CD19-scFv1 | scFv | EIVMTQSPATLSLSPGERATLSCRASQDISKYLNWYQQ | 96 |
| | | KPGQAPRLLIYHTSRLHSGIPARFSGSGSGTDYTLTISS | |
| | | LQPEDFAVYFCQQGNTLPYTFGQGTKLEIKGGGGSGG | |
| | | GGSGGGGSQVQLQESGPGLVKPSETLSLTCTVSGVS | |
| | | LPDYGVSWIRQPPGKGLEWIGVIWGSETTYYSSSLKS | |
| | | RVTISKDNSKNQVSLKLSSVTAADTAVYYCAKHYYYGG | |
| | | SYAMDYWGQGTLVTVSS | |
| CD19-scFv2 | scFv | EIVMTQSPATLSLSPGERATLSCRASQDISKYLNWYQQ | 97 |
| | | KPGQAPRLLIYHTSRLHSGIPARFSGSGSGTDYTLTISS | |
| | | LQPEDFAVYFCQQGNTLPYTFGQGTKLEIKGGGGSGG | |
| | | GGSGGGGSQVQLQESGPGLVKPSETLSLTCTVSGVS | |
| | | LPDYGVSWIRQPPGKGLEWIGVIWGSETTYYQSSLKS | |
| | | RVTISKDNSKNQVSLKLSSVTAADTAVYYCAKHYYYGG | |
| | | SYAMDYWGQGTLVTVSS | |
| CD19-scFv3 | scFv | QVQLQESGPGLVKPSETLSLTCTVSGVSLPDYGVSWI | 98 |
| | | RQPPGKGLEWIGVIWGSETTYYSSSLKSRVTISKDNSK | |
| | | NQVSLKLSSVTAADTAVYYCAKHYYYGGSYAMDYWG | |
| | | QGTLVTVSSGGGGSGGGGSGGGGSEIVMTQSPATLS | |
| | | LSPGERATLSCRASQDISKYLNWYQQKPGQAPRLLIYH | |
| | | TSRLHSGIPARFSGSGSGTDYTLTISSLQPEDFAVYFC | |
| | | QQGNTLPYTFGQGTKLEIK | |
| CD19-scFv4 | scFv | QVQLQESGPGLVKPSETLSLTCTVSGVSLPDYGVSWI | 99 |
| | | RQPPGKGLEWIGVIWGSETTYYQSSLKSRVTISKDNSK | |
| | | NQVSLKLSSVTAADTAVYYCAKHYYYGGSYAMDYWG | |
| | | QGTLVTVSSGGGGSGGGGSGGGGSEIVMTQSPATLS | |
| | | LSPGERATLSCRASQDISKYLNWYQQKPGQAPRLLIYH | |
| | | TSRLHSGIPARFSGSGSGTDYTLTISSLQPEDFAVYFC | |
| | | QQGNTLPYTFGQGTKLEIK | |
| CD19-scFv5 | scFv | EIVMTQSPATLSLSPGERATLSCRASQDISKYLNWYQQ | 100 |
| | | KPGQAPRLLIYHTSRLHSGIPARFSGSGSGTDYTLTISS | |
| | | LQPEDFAVYFCQQGNTLPYTFGQGTKLEIKGGGGSGG | |
| | | GGSGGGGSGGGGSQVQLQESGPGLVKPSETLSLTCT | |
| | | VSGVSLPDYGVSWIRQPPGKGLEWIGVIWGSETTYYS | |
| | | SSLKSRVTISKDNSKNQVSLKLSSVTAADTAVYYCAKH | |
| | | YYYGGSYAMDYWGQGTLVTVSS | |
| CD19-scFv6 | scFv | EIVMTQSPATLSLSPGERATLSCRASQDISKYLNWYQQ | 101 |
| | | KPGQAPRLLIYHTSRLHSGIPARFSGSGSGTDYTLTISS | |
| | | LQPEDFAVYFCQQGNTLPYTFGQGTKLEIKGGGGSGG | |
| | | GGSGGGGSGGGGSQVQLQESGPGLVKPSETLSLTCT | |
| | | VSGVSLPDYGVSWIRQPPGKGLEWIGVIWGSETTYYQ | |
| | | SSLKSRVTISKDNSKNQVSLKLSSVTAADTAVYYCAKH | |
| | | YYYGGSYAMDYWGQGTLVTVSS | |
| CD19-scFv7 | scFv | QVQLQESGPGLVKPSETLSLTCTVSGVSLPDYGVSWI | 102 |
| | | RQPPGKGLEWIGVIWGSETTYYSSSLKSRVTISKDNSK | |
| | | NQVSLKLSSVTAADTAVYYCAKHYYYGGSYAMDYWG | |
| | | QGTLVTVSSGGGGSGGGGSGGGGSGGGGSEIVMTQ | |
| | | SPATLSLSPGERATLSCRASQDISKYLNWYQQKPGQA | |
| | | PRLLIYHTSRLHSGIPARFSGSGSGTDYTLTISSLQPED | |
| | | FAVYFCQQGNTLPYTFGQGTKLEIK | |
| CD19-scFv8 | scFv | QVQLQESGPGLVKPSETLSLTCTVSGVSLPDYGVSWI | 103 |
| | | RQPPGKGLEWIGVIWGSETTYYQSSLKSRVTISKDNSK | |
| | | NQVSLKLSSVTAADTAVYYCAKHYYYGGSYAMDYWG | |
| | | QGTLVTVSSGGGGSGGGGSGGGGSGGGGSEIVMTQ | |
| | | SPATLSLSPGERATLSCRASQDISKYLNWYQQKPGQA | |
| | | PRLLIYHTSRLHSGIPARFSGSGSGTDYTLTISSLQPED | |
| | | FAVYFCQQGNTLPYTFGQGTKLEIK | |
| CD19-scFv9 | scFv | EIVMTQSPATLSLSPGERATLSCRASQDISKYLNWYQQ | 104 |
| | | KPGQAPRLLIYHTSRLHSGIPARFSGSGSGTDYTLTISS | |
| | | LQPEDFAVYFCQQGNTLPYTFGQGTKLEIKGGGGSGG | |
| | | GGSGGGGSGGGGSQVQLQESGPGLVKPSETLSLTCT | |
| | | VSGVSLPDYGVSWIRQPPGKGLEWIGVIWGSETTYYN | |
| | | SSLKSRVTISKDNSKNQVSLKLSSVTAADTAVYYCAKH | |
| | | YYYGGSYAMDYWGQGTLVTVSS | |
| CD19- | scFv | QVQLQESGPGLVKPSETLSLTCTVSGVSLPDYGVSWI | 105 |
| scFv10 | | RQPPGKGLEWIGVIWGSETTYYNSSLKSRVTISKDNSK | |
| | | NQVSLKLSSVTAADTAVYYCAKHYYYGGSYAMDYWG | |
| | | QGTLVTVSSGGGGSGGGGSGGGGSGGGGSEIVMTQ | |
| | | SPATLSLSPGERATLSCRASQDISKYLNWYQQKPGQA | |
| | | PRLLIYHTSRLHSGIPARFSGSGSGTDYTLTISSLQPED | |
| | | FAVYFCQQGNTLPYTFGQGTKLEIK | |
| CD19- | scFv | EIVMTQSPATLSLSPGERATLSCRASQDISKYLNWYQQ | 106 |
| scFv11 | | KPGQAPRLLIYHTSRLHSGIPARFSGSGSGTDYTLTISS | |
| | | LQPEDFAVYFCQQGNTLPYTFGQGTKLEIKGGGGSGG | |
| | | GGSGGGGSQVQLQESGPGLVKPSETLSLTCTVSGVS | |
| | | LPDYGVSWIRQPPGKGLEWIGVIWGSETTYYNSSLKS | |
| | | RVTISKDNSKNQVSLKLSSVTAADTAVYYCAKHYYYGG | |
| | | SYAMDYWGQGTLVTVSS | |
| CD19- | scFv | QVQLQESGPGLVKPSETLSLTCTVSGVSLPDYGVSWI | 107 |
| scFv12 | | RQPPGKGLEWIGVIWGSETTYYNSSLKSRVTISKDNSK | |
| | | NQVSLKLSSVTAADTAVYYCAKHYYYGGSYAMDYWG | |
| | | QGTLVTVSSGGGGSGGGGSGGGGSEIVMTQSPATLS | |
| | | LSPGERATLSCRASQDISKYLNWYQQKPGQAPRLLIYH | |
| | | TSRLHSGIPARFSGSGSGTDYTLTISSLQPEDFAVYFC | |
| | | QQGNTLPYTFGQGTKLEIK | |

[0201] In certain aspects, a CD19 binding molecule comprises heavy chain CDRs having the amino acid sequences of CD19-H1, CD19-1H2A, and CD19-1H3 as set forth in Table 10 and light chain CDRs having the amino acid sequences of CD19-L1, CD19-1L2, and CD19-1L3 as set forth in Table 1C. In a specific embodiment, a CD19 binding molecule comprises a heavy chain variable region having the amino acid sequences of VHA as set forth in Table 1C and a light chain variable region having the amino acid sequences of VLA as set forth in Table 1C.

[0202] In other aspects, a CD19 binding molecule comprises heavy chain CDRs having the amino acid sequences of CD19-H1, CD19-H2B, and CD19-H3 as set forth in Table 1C and light chain CDRs having the amino acid sequences of CD19-L1, CD19-L2, and CD19-L3 as set forth in Table 1C. In a specific embodiment, a CD19 binding molecule comprises a heavy chain variable region having the amino acid sequences of VHB as set forth in Table 1C and a light chain variable region having the amino acid sequences of VLB as set forth in Table 1C.

[0203] In further aspects, a CD19 binding molecule comprises heavy chain CDRs having the amino acid sequences of CD19-H1, CD19-H2C, and CD19-H3 as set forth in Table 1C and light chain CDRs having the amino acid sequences of CD19-L1, CD19-L2, and CD19-L3 as set forth in Table 1C. In a specific embodiment, a CD19 binding molecule comprises a heavy chain variable region having the amino acid sequences of VHC as set forth in Table 1C and a light chain variable region having the amino acid sequences of VLB as set forth in Table 1C.

[0204] In further aspects, a CD19 binding molecule comprises heavy chain CDRs having the amino acid sequences of CD19-H1, CD19-H2D, and CD19-H3 as set forth in Table 1C and light chain CDRs having the amino acid sequences of CD19-L1, CD19-L2, and CD19-L3 as set forth in Table 1C. In a specific embodiment, a CD19 binding molecule comprises a heavy chain variable region having the amino acid sequences of VHD as set forth in Table 1C and a light chain variable region having the amino acid sequences of VLB as set forth in Table 1C.

[0205] In yet further aspects, a CD19 binding molecule is in the form of an scFV. Exemplary anti-CD19 scFvs comprise the amino acid sequence of any one of CD19-scFv1 through CD19-scFv12 as set forth in Table 1C.

[0206] Other CD19 binding molecules include amino acids that have been mutated, yet have at least 80, 85, 90, 95, 96, 97, 98, or 99 percent identity in the CDR regions with the CDR sequences described in Table 1. In some embodiments, such CD19 binding molecules include mutant amino acid sequences where no more than 1, 2, 3, 4 or 5 amino acids have been mutated in the CDR regions when compared with the CDR sequences described in Table 1.

[0207] Other CD19 binding molecules include VH and/or VL domains comprising amino acid sequences having at least 80, 85, 90, 95, 96, 97, 98, or 99 percent identity to the VH and/or VL sequences described in Table 1. In some embodiments, CD19 binding molecules include VH and/or VL domains where no more than 1, 2, 3, 4 or 5 amino acids have been mutated when compared with the VH and/or VL domains depicted in the sequences described in Table 1, while retaining substantially the same therapeutic activity.

[0208] Additional CD19 binding molecules can be generated through the techniques of gene-shuffling, motif-shuffling, exon-shuffling, and/or codon-shuffling (collectively referred to as “DNA shuffling”). DNA shuffling can be employed to alter the activities of molecules of the disclosure or fragments thereof (e.g., molecules or fragments thereof with higher affinities and lower dissociation rates). See, generally, U.S. Pat. Nos. 5,605,793, 5,811,238, 5,830,721, 5,834,252, and 5,837,458; Patten et al., 1997, Curr. Opinion Biotechnol. 8:724-33; Harayama, 1998, Trends Biotechnol. 16(2):76-82; Hansson et al., 1999, J. Mol. Biol. 287:265-76; and Lorenzo and Blasco, 1998, Biotechniques 24(2):308-313. The CD19 binding molecules described herein or fragments thereof can be altered by being subjected to random mutagenesis by error-prone PCR, random nucleotide insertion or other methods prior to recombination. A polynucleotide encoding a fragment of a CD19 binding molecule described herein can be recombined with one or more components, motifs, sections, parts, domains, fragments, etc. of one or more heterologous molecules.

[0209] Moreover, CD19 binding molecules can be fused to marker sequences, such as a peptide to facilitate purification. In some embodiments, the marker amino acid sequence is a hexa-histidine peptide (SEQ ID NO: 1253), such as the tag provided in a pQE vector (QIAGEN, Inc., 9259 Eton Avenue, Chatsworth, CA, 91311), among others, many of which are commercially available. As described in Gentz et al., 1989, Proc. Natl. Acad. Sci. USA 86:821-824, for instance, hexa-histidine (SEQ ID NO: 1253) provides for convenient purification of the fusion protein. Other peptide tags useful for purification include, but are not limited to, the hemagglutinin (“HA”) tag, which corresponds to an epitope derived from the influenza hemagglutinin protein (Wilson et al., 1984 Cell 37:767), and the “flag” tag.

[0210] Various other CD19 binding molecules, some of which are monospecific and some of which are multispecific, are known in the art and can also be used in the methods and combinations of the disclosure. See, for example, WO 2014/031687; WO 2012/079000; WO 2014/153270; U.S. Pat. No. 7,741,465; Naddafi et al., 2015, Int J Mol Cell Med. 4(3): 143-151; and Hammer, 2012, MAbs. 4(5): 571-577, the contents of which are incorporated herein by reference. In specific embodiments, the CD19 binding molecule is blinatumomab (Amgen), coltuximab ravtansine (Immunogen), MOR208 (also called XmAb-5574; Morphosys), MEDI-551 (Medlmmune), denintuzumab mafodotin (also called SGN-CD19A; Seattle Genetics), DI-B4 (Merck Serono), taplitumomabpaptox (National Cancer Institute), XmAb 5871 (Xencor), MDX-1342 (Bristol-Myers Squibb), AFM11 (Affimed), MDX-1342 (BMS), loncastuximab tesirine (ADC Therapeutics) or GBR401 (Glenmark).

### 7.2.1. Antigen Binding Modules of Multispecific Binding Molecules

[0211] In some aspects, one or more of the molecules used in the methods and combinations of the disclosure are multispecific binding molecules. For example, a CD19 binding molecule can in some embodiments be a multispecific binding molecule (MBM), e.g., a bispecific binding molecule (BBM) or trispecific binding molecule (TBM). Typically, one or more ABMs of the MBMs comprise immunoglobulin-based antigen-binding domains, for example the sequences of antibody fragments or derivatives. These antibody fragments and derivatives typically include the CDRs of an antibody and can include larger fragments and derivatives thereof, e.g., Fabs, scFabs, Fvs, and scFvs.

[0212] Immunoglobulin-based ABMs can comprise modifications to framework residues within a VH and/or a VL, e.g. to improve the properties of a MBM containing the ABM. For example, framework modifications can be made to decrease immunogenicity of a MBM. One approach for making such framework modifications is to “back-mutate” one or more framework residues of the ABM to a corresponding germline sequence. Such residues can be identified by comparing framework sequences to germline sequences from which the ABM is derived. To “match” framework region sequences to desired germline configuration, residues can be “back-mutated” to a corresponding germline sequence by, for example, site-directed mutagenesis. MBMs having such “back-mutated” ABMs are intended to be encompassed by the disclosure.

[0213] Another type of framework modification involves mutating one or more residues within a framework region, or even within one or more CDR regions, to remove T-cell epitopes to thereby reduce potential immunogenicity of a MBM. This approach is also referred to as “deimmunization” and is described in further detail in U.S. Patent Publication 20030153043 by Carr et al.

[0214] ABMs can also be modified to have altered glycosylation, which can be useful, for example, to increase the affinity of a MBM for one or more of its antigens. Such carbohydrate modifications can be accomplished by, for example, altering one or more sites of glycosylation within an ABM sequence. For example, one or more amino acid substitutions can be made that result in elimination of one or more variable region framework glycosylation sites to thereby eliminate glycosylation at that site. Such aglycosylation can increase the affinity of the MBM for an antigen. Such an approach is described in, e.g., U.S. Pat. Nos. 5,714,350 and 6,350,861 by Co et al.

### 7.2.1.1. Immunoglobulin Based ABMs

### 7.2.1.1.1. Fabs

[0215] In certain aspects, an ABM is a Fab domain.

[0216] For the MBMs of the disclosure, it is advantageous to use Fab heterodimerization strategies to permit the correct association of Fab domains belonging to the same ABM and minimize aberrant pairing of Fab domains belonging to different ABMs. For example, the Fab heterodimerization strategies shown in Table 2 below can be used:

TABLE 2
Fab Heterodimerization Strategies

| Name | STRATEGY | VH | CH1 | VL | CL | REFERENCE |
|---|---|---|---|---|---|---|
| F1 | CrossMabCH1-CL | WT | CL | WT | CH1 | Schaefer et al., 2011, |
| | | | domain | | domain | Cancer Cell 2011; |
| | | | | | | 20: 472-86; |
| | | | | | | PMID: 22014573. |
| F2 | orthogonal Fab | 39K, | H172A, | 1R, 38D, | L135Y, | Lewis et al., 2014, Nat |
| | VHVRD1CH1CRD2 - | 62E | F174G | (36F) | S176W | Biotechnol 32: 191-8 |
| | VLVRD1CλCRD2 | | | | | |
| F3 | orthogonal Fab | 39Y | WT | 38R | WT | Lewis et al., 2014, Nat |
| | VHVRD2CH1wt - | | | | | Biotechnol 32: 191-8 |
| | VLVRD2Cλwt | | | | | |
| F4 | TCR CαCβ | 39K | TCR Cα | 38D | TCR Cβ | Wu et al., 2015, MAbs |
| | | | | | | 7: 364-76 |
| F5 | CR3 | WT | T192E | WT | N137K, | Golay at al., 2016, J |
| | | | | | S114A | Immunol 196: 3199-211. |
| F6 | MUT4 | WT | L143Q, | WT | V133T, | Golay at al., 2016, J |
| | | | S188V | | S176V | Immunol 196: 3199-211. |
| F7 | DuetMab | WT | F126C | WT | S121C | Mazor et al., 2015, |
| | | | | | | MAbs 7: 377-89; Mazor |
| | | | | | | et al., 2015, MAbs |
| | | | | | | 7: 461-669. |

[0217] Accordingly, in certain embodiments, correct association between the two polypeptides of a Fab is promoted by exchanging the VL and VH domains of the Fab for each other or exchanging the CH1 and CL domains for each other, e.g., as described in WO 2009/080251.

[0218] Correct Fab pairing can also be promoted by introducing one or more amino acid modifications in the CH1 domain and one or more amino acid modifications in the CL domain of the Fab and/or one or more amino acid modifications in the VH domain and one or more amino acid modifications in the VL domain. The amino acids that are modified are typically part of the VH:VL and CH1:CL interface such that the Fab components preferentially pair with each other rather than with components of other Fabs.

[0219] In one embodiment, the one or amino acid modifications are limited to the conserved framework residues of the variable (VH, VL) and constant (CH1, CL) domains as indicated by the Kabat numbering of residues. Almagro, 2008, Frontiers In Bioscience 13:1619-1633 provides a definition of the framework residues on the basis of Kabat, Chothia, and IMGT numbering schemes.

[0220] In one embodiment, the modifications introduced in the VH and CH1 and/or VL and CL domains are complementary to each other. Complementarity at the heavy and light chain interface can be achieved on the basis of steric and hydrophobic contacts, electrostatic/charge interactions or a combination of the variety of interactions. The complementarity between protein surfaces is broadly described in the literature in terms of lock and key fit, knob into hole, protrusion and cavity, donor and acceptor etc., all implying the nature of structural and chemical match between the two interacting surfaces.

[0221] In one embodiment, the one or more introduced modifications introduce a new hydrogen bond across the interface of the Fab components. In one embodiment, the one or more introduced modifications introduce a new salt bridge across the interface of the Fab components. Exemplary substitutions are described in WO 2014/150973 and WO 2014/082179.

[0222] In some embodiments, the Fab domain comprises a 192E substitution in the CH1 domain and 114A and 137K substitutions in the CL domain, which introduces a salt-bridge between the CH1 and CL domains (see, Golay et al., 2016, J Immunol 196:3199-211).

[0223] In some embodiments, the Fab domain comprises a 143Q and 188V substitutions in the CH1 domain and 113T and 176V substitutions in the CL domain, which serves to swap hydrophobic and polar regions of contact between the CH1 and CL domain (see, Golay et al., 2016, J Immunol 196:3199-211).

[0224] In some embodiments, the Fab domain can comprise modifications in some or all of the VH, CH1, VL, CL domains to introduce orthogonal Fab interfaces which promote correct assembly of Fab domains (Lewis et al., 2014 Nature Biotechnology 32:191-198). In an embodiment, 39K, 62E modifications are introduced in the VH domain, H172A, F174G modifications are introduced in the CH1 domain, 1R, 38D, (36F) modifications are introduced in the VL domain, and L135Y, S176W modifications are introduced in the CL domain. In another embodiment, a 39Y modification is introduced in the VH domain and a 38R modification is introduced in the VL domain.

[0225] Fab domains can also be modified to replace the native CH1:CL disulfide bond with an engineered disulfide bond, thereby increasing the efficiency of Fab component pairing. For example, an engineered disulfide bond can be introduced by introducing a 126C in the CH1 domain and a 121C in the CL domain (see, Mazor et al., 2015, MAbs 7:377-89).

[0226] Fab domains can also be modified by replacing the CH1 domain and CL domain with alternative domains that promote correct assembly. For example, Wu et al., 2015, MAbs 7:364-76, describes substituting the CH1 domain with the constant domain of the a T cell receptor and substituting the CL domain with the p domain of the T cell receptor, and pairing these domain replacements with an additional charge-charge interaction between the VL and VH domains by introducing a 38D modification in the VL domain and a 39K modification in the VH domain.

[0227] ABMs can comprise a single chain Fab fragment, which is a polypeptide consisting of an antibody heavy chain variable domain (VH), an antibody constant domain 1 (CH1), an antibody light chain variable domain (VL), an antibody light chain constant domain (CL) and a linker. In some embodiments, the antibody domains and the linker have one of the following orders in N-terminal to C-terminal direction: a) VH—CH1-linker-VL-CL, b) VL-CL-linker-VH—CH1, c) VH-CL-linker-VL-CH1 or d) VL-CH1-linker-VH-CL. The linker can be a polypeptide of at least 30 amino acids, e.g., between 32 and 50 amino acids. The single chain Fab domains are stabilized via the natural disulfide bond between the CL domain and the CH1 domain.

[0228] In an embodiment, the antibody domains and the linker in the single chain Fab fragment have one of the following orders in N-terminal to C-terminal direction: a) VH—CH1-linker-VL-CL, or b) VL-CL-linker-VH—CH1. In some cases, VL-CL-linker-VH—CH1 is used.

[0229] In another embodiment, the antibody domains and the linker in the single chain Fab fragment have one of the following orders in N-terminal to C-terminal direction: a) VH-CL-linker-VL-CH1 or b) VL-CH1-linker-VH-CL.

[0230] Optionally in the single chain Fab fragment, additionally to the natural disulfide bond between the CL-domain and the CH1 domain, also the antibody heavy chain variable domain (VH) and the antibody light chain variable domain (VL)ABM are disulfide stabilized by introduction of a disulfide bond between the following positions: i) heavy chain variable domain position 44 to light chain variable domain position 100, ii) heavy chain variable domain position 105 to light chain variable domain position 43, or iii) heavy chain variable domain position 101 to light chain variable domain position 100 (numbering according to EU index of Kabat).

[0231] In one embodiment, the optional disulfide bond between the variable domains of the single chain Fab fragments is between heavy chain variable domain position 44 and light chain variable domain position 100. In one embodiment, the optional disulfide bond between the variable domains of the single chain Fab fragments is between heavy chain variable domain position 105 and light chain variable domain position 43 (numbering according to EU index of Kabat).

7.2.1.1.2. scFvs

[0232] In certain aspects, an ABM is a single chain Fv or “scFv”. Examples of linkers suitable for connecting the VH and VL chains of an scFV are the ABM linkers identified in Section 7.2.2.3, for example any of the linkers designated L1 through L54.

[0233] To create an scFv-encoding nucleic acid, the VH and VL-encoding DNA fragments are operably linked to another fragment encoding a linker, e.g., encoding any of the ABM linkers described in Section 7.2.2.3 (such as the amino acid sequence (Gly4˜Ser)3 (SEQ ID NO: 1174)

### 7.2.1.1.3. Other Immunoglobulin-Based ABMs

[0234] MBMs can also comprise ABMs having an immunoglobulin format which is other than Fab or scFv, for example Fv, dsFv, (Fab′)2, a single domain antibody (SDAB), a VH or VL domain, or a camelid VHH domain (also called a nanobody).

[0235] An ABM can be a single domain antibody composed of a single VH or VL domain which exhibits sufficient affinity to the target. In an embodiment, the single domain antibody is a camelid VHH domain (see, e.g., Riechmann, 1999, Journal of Immunological Methods 231:25-38; WO 94/04678).

### 7.2.1.2. Non-Immunoglobulin Based ABM

[0236] In certain embodiments, MBMs comprise one or more of the ABMs derived from non-antibody scaffold proteins (including, but not limited to, designed ankyrin repeat proteins (DARPins), Avimers (short for avidity multimers), Anticalin/Lipocalins, Centyrins, Kunitz domains, Adnexins, Affilins, Affitins (also known as Nonfitins), Knottins, Pronectins, Versabodies, Duocalins, and Fynomers), ligands, receptors, cytokines or chemokines.

[0237] Non-immunoglobulin scaffolds that can be used in the MBMs include those listed in Tables 3 and 4 of Mintz and Crea, 2013, Bioprocess International 11(2):40-48; in FIG. 1, Table 1 and FIG. I of Vazquez-Lombardi et al., 2015, Drug Discovery Today 20(10):1271-83; in Table 1 and Box 2 of Skrlec et al., 2015, Trends in Biotechnology 33(7):408-18. The contents of Tables 3 and 4 of Mintz and Crea, 2013, Bioprocess International 11(2):40-48; in FIG. 1, Table 1 and FIG. I of Vazquez-Lombardi et al., 2015, Drug Discovery Today 20(10):1271-83; in Table 1 and Box 2 of Skrlec et al., 2015, Trends in Biotechnology 33(7):408-18 (collectively, “Scaffold Disclosures”). In a particular embodiment, the Scaffold Disclosures are incorporated by reference for what they disclose relating to Adnexins. In another embodiment, the Scaffold Disclosures are incorporated by reference for what they disclose relating to Avimers. In another embodiment, the Scaffold Disclosures are incorporated by reference for what they disclose relating to Affibodies. In yet another embodiment, the Scaffold Disclosures are incorporated by reference for what they disclose relating to Anticalins. In yet another embodiment, the Scaffold Disclosures are incorporated by reference for what they disclose relating to DARPins. In yet another embodiment, the Scaffold Disclosures are incorporated by reference for what they disclose relating to Kunitz domains. In yet another embodiment, the Scaffold Disclosures are incorporated by reference for what they disclose relating to Knottins. In yet another embodiment, the Scaffold Disclosures are incorporated by reference for what they disclose relating to Pronectins. In yet another embodiment, the Scaffold Disclosures are incorporated by reference for what they disclose relating to Nanofitins. In yet another embodiment, the Scaffold Disclosures are incorporated by reference for what they disclose relating to Affilins. In yet another embodiment, the Scaffold Disclosures are incorporated by reference for what they disclose relating to Adnectins. In yet another embodiment, the Scaffold Disclosures are incorporated by reference for what they disclose relating to ABMs. In yet another embodiment, the Scaffold Disclosures are incorporated by reference for what they disclose relating to Adhirons. In yet another embodiment, the Scaffold Disclosures are incorporated by reference for what they disclose relating to Affimers. In yet another embodiment, the Scaffold Disclosures are incorporated by reference for what they disclose relating to Alphabodies. In yet another embodiment, the Scaffold Disclosures are incorporated by reference for what they disclose relating to Armadillo Repeat Proteins. In yet another embodiment, the Scaffold Disclosures are incorporated by reference for what they disclose relating to Atrimers/Tetranectins. In yet another embodiment, the Scaffold Disclosures are incorporated by reference for what they disclose relating to Obodies/OB-folds. In yet another embodiment, the Scaffold Disclosures are incorporated by reference for what they disclose relating to Centyrins. In yet another embodiment, the Scaffold Disclosures are incorporated by reference for what they disclose relating to Repebodies. In yet another embodiment, the Scaffold Disclosures are incorporated by reference for what they disclose relating to Anticalins. In yet another embodiment, the Scaffold Disclosures are incorporated by reference for what they disclose relating to Atrimers. In yet another embodiment, the Scaffold Disclosures are incorporated by reference for what they disclose relating to bicyclic peptides. In yet another embodiment, the Scaffold Disclosures are incorporated by reference for what they disclose relating to cys-knots. In yet another embodiment, the Scaffold Disclosures are incorporated by reference for what they disclose relating to Fn3 scaffolds (including Adnectins, Centryrins, Pronectins, and Tn3).

[0238] In an embodiment, an ABM can be a designed ankyrin repeat protein (“DARPin”). DARPins are antibody mimetic proteins that typically exhibit highly specific and high-affinity target protein binding. They are typically genetically engineered and derived from natural ankyrin proteins and consist of at least three, usually four or five repeat motifs of these proteins. Their molecular mass is about 14 or 18 kDa (kilodaltons) for four- or five-repeat DARPins, respectively. Examples of DARPins can be found, for example in U.S. Pat. No. 7,417,130. Multispecific binding molecules comprising DARPin binding modules and immunoglobulin-based binding modules are disclosed in, for example, U.S. Publication No. 2015/0030596 A1.

[0239] In another embodiment, an ABM can be an Affibody. An Affibody is well known and refers to affinity proteins based on a 58 amino acid residue protein domain, derived from one of the IgG binding domain of staphylococcal protein A.

[0240] In another embodiment, an ABM can be an Anticalin. Anticalins are well known and refer to another antibody mimetic technology, where the binding specificity is derived from Lipocalins. Anticalins can also be formatted as dual targeting protein, called Duocalins.

[0241] In another embodiment, an ABM can be a Versabody. Versabodies are well known and refer to another antibody mimetic technology. They are small proteins of 3-5 kDa with >15% cysteines, which form a high disulfide density scaffold, replacing the hydrophobic core of typical proteins.

[0242] Other non-immunoglobulin ABMs include “A” domain oligomers (also known as Avimers) (see for example, U.S. Patent Application Publication Nos. 2005/0164301, 2005/0048512, and 2004/017576), Fn3 based protein scaffolds (see for example, U.S. Patent Application Publication 2003/0170753), VASP polypeptides, Avian pancreatic polypeptide (aPP), Tetranectin (based on CTLD3), Affililin (based on yB-crystallin/ubiquitin), Knottins, SH3 domains, PDZ domains, Tendamistat, Neocarzinostatin, Protein A domains, Lipocalins, Transferrin, or Kunitz domains. In one aspect, ABMs useful in the construction of the MBMs comprise fibronectin-based scaffolds as exemplified in WO 2011/130324.

[0243] Moreover, in certain aspects, an ABM comprises a ligand binding domain of a receptor or a receptor binding domain of a ligand.

### 7.2.2. Connectors

[0244] It is contemplated that the CD19 binding molecules can in some instances include pairs of ABMs or ABM chains (e.g., the VH—CH1 or VL-CL component of a Fab) connected directly to one another, e.g., as a fusion protein without a linker. For example, the CD19 binding molecules can comprise connector moieties linking individual ABMs or ABM chains. The use of connector moieties can improve target binding, for example by increasing flexibility of the ABMs within a CD19 binding molecule and thus reducing steric hindrance. The ABMs or ABM chains can be connected to one another through, for example, Fc domains (each Fc domain representing a pair of associated Fc regions) and/or ABM linkers. The use of Fc domains will typically require the use of hinge regions as connectors of the ABMs or ABM chains for optimal antigen binding. Thus, the term “connector” encompasses, but is not limited to, Fc regions, Fc domains, and hinge regions.

[0245] Connectors can be selected or modified to, for example, increase or decrease the biological half-life of a CD19 binding molecule. For example, to decrease biological half-life, one or more amino acid mutations can be introduced into a CH2-CH3 domain interface region of an Fc-hinge fragment such that a CD19 binding molecule comprising the fragment has impaired Staphylococcyl Protein A (SpA) binding relative to native Fc-hinge domain SpA binding. This approach is described in further detail in U.S. Pat. No. 6,165,745 by Ward et al. Alternatively, a CD19 binding molecule can be modified to increase its biological half-life. For example, one or more of the following mutations can be introduced: T252L, T254S, T256F, as described in U.S. Pat. No. 6,277,375 to Ward. Alternatively, to increase the biological half-life, a CD19 binding molecule can be altered within a CH1 or CL region to contain a salvage receptor binding epitope taken from two loops of a CH2 domain of an Fc region of an IgG, as described in U.S. Pat. Nos. 5,869,046 and 6,121,022 by Presta et al.

[0246] Examples of Fc domains (formed by the pairing of two Fc regions), hinge regions and ABM linkers are described in Sections 7.2.2.1, 7.2.2.2, and 7.2.2.3, respectively.

### 7.2.2.1. Fc Domains

[0247] The CD19 binding molecules can include an Fc domain derived from any suitable species. In one embodiment, the Fc domain is derived from a human Fc domain.

[0248] The Fc domain can be derived from any suitable class of antibody, including IgA (including subclasses IgA1 and IgA2), IgD, IgE, IgG (including subclasses IgG1, IgG2, IgG3 and IgG4), and IgM. In one embodiment, the Fc domain is derived from IgG1, IgG2, IgG3 or IgG4. In one embodiment, the Fc domain is derived from IgG1. In one embodiment, the Fc domain is derived from IgG4.

[0249] The Fc domain comprises two polypeptide chains, each referred to as a heavy chain Fc region. The two heavy chain Fc regions dimerize to create the Fc domain. The two Fc regions within the Fc domain can be the same or different from one another. In a native antibody the Fc regions are typically identical, but for the purpose of producing multispecific binding molecules of the disclosure, the Fc regions might advantageously be different to allow for heterodimerization, as described in Section 7.2.2.1.5 below.

[0250] Typically each heavy chain Fc region comprises or consists of two or three heavy chain constant domains.

[0251] In native antibodies, the heavy chain Fc region of IgA, IgD and IgG is composed of two heavy chain constant domains (CH2 and CH3) and that of IgE and IgM is composed of three heavy chain constant domains (CH2, CH3 and CH4). These dimerize to create an Fc domain.

[0252] In the present disclosure, the heavy chain Fc region can comprise heavy chain constant domains from one or more different classes of antibody, for example one, two or three different classes.

[0253] In one embodiment, the heavy chain Fc region comprises CH2 and CH3 domains derived from IgG1. An exemplary sequence of a heavy chain Fc region derived from human IgG1 is given in SEQ ID NO:251:

(SEQ ID NO: 251)
DKTHTCPPCPAPELLGGPSVFLFPPKPKDTLMISRTPEVTCVVVDVSHE
DPEVKFNWYVDGVEVHNAKTKPREEQYNSTYRVVSVLTVLHQDWLNGKE
YKCKVSNKALPAPIEKTISKAKGQPREPQVYTLPPSRDELTKNQVSLTC
LVKGFYPSDIAVEWESNGQPENNYKTTPPVLDSDGSFFLYSKLTVDKSR
WQQGNVFSCSVMHEALHNHYTQKSLSLSP.

In some embodiments, a CD19 binding molecule comprises a Fc region whose amino acid sequence comprises the amino acid sequence of SEQ ID NO:251 modified with one or more of the substitutions described in Section 7.2.2.1 and its subparts.

[0254] In one embodiment, the heavy chain Fc region comprises CH2 and CH3 domains derived from IgG2.

[0255] In one embodiment, the heavy chain Fc region comprises CH2 and CH3 domains derived from IgG3.

[0256] In one embodiment, the heavy chain Fc region comprises CH2 and CH3 domains derived from IgG4.

[0257] In one embodiment, the heavy chain Fc region comprises a CH4 domain from IgM. The IgM CH4 domain is typically located at the C-terminus of the CH3 domain.

[0258] In one embodiment, the heavy chain Fc region comprises CH2 and CH3 domains derived from IgG and a CH4 domain derived from IgM.

[0259] It will be appreciated that the heavy chain constant domains for use in producing a heavy chain Fc region for the CD19 binding molecules of the present disclosure can include variants of the naturally occurring constant domains described above. Such variants can comprise one or more amino acid variations compared to wild type constant domains. In one example the heavy chain Fc region of the present disclosure comprises at least one constant domain that varies in sequence from the wild type constant domain. It will be appreciated that the variant constant domains can be longer or shorter than the wild type constant domain. For example, the variant constant domains are at least 60% identical or similar to a wild type constant domain. In another example the variant constant domains are at least 70% identical or similar. In another example the variant constant domains are at least 75% identical or similar. In another example the variant constant domains are at least 80% identical or similar. In another example the variant constant domains are at least 85% identical or similar. In another example the variant constant domains are at least 90% identical or similar. In another example the variant constant domains are at least 95% identical or similar. In another example the variant constant domains are at least 99% identical or similar. Exemplary Fc variants are described in Sections 7.2.2.1.1 through 7.2.2.1.6, infra.

[0260] IgM and IgA occur naturally in humans as covalent multimers of the common H2L2 antibody unit. IgM occurs as a pentamer when it has incorporated a J-chain, or as a hexamer when it lacks a J-chain. IgA occurs as monomer and dimer forms. The heavy chains of IgM and IgA possess an 18 amino acid extension to the C-terminal constant domain, known as a tailpiece. The tailpiece includes a cysteine residue that forms a disulfide bond between heavy chains in the polymer, and is believed to have an important role in polymerization. The tailpiece also contains a glycosylation site. In certain embodiments, the CD19 binding molecules of the present disclosure do not comprise a tailpiece.

[0261] The Fc domains that are incorporated into the CD19 binding molecules can comprise one or more modifications that alter one or more functional properties of the proteins, such as serum half-life, complement fixation, Fc receptor binding, and/or antigen-dependent cellular cytotoxicity. Furthermore, a CD19 binding molecule can be chemically modified (e.g., one or more chemical moieties can be attached to the CD19 binding molecule) or be modified to alter its glycosylation, again to alter one or more functional properties of the CD19 binding molecule.

[0262] Effector function of an antibody molecule includes complement-mediated effector function, which is mediated by, for example, binding of the C1 component of the complement to the antibody. Activation of complement is important in the opsonization and direct lysis of pathogens. In addition, it stimulates the inflammatory response by recruiting and activating phagocytes to the site of complement activation. Effector function includes Fc receptor (FcR)-mediated effector function, which can be triggered upon binding of the constant domains of an antibody to an Fc receptor (FcR). Antigen-antibody complex-mediated crosslinking of Fc receptors on effector cell surfaces triggers a number of important and diverse biological responses including engulfment and destruction of antibody-coated particles, clearance of immune complexes, Iysis of antibody-coated target cells by killer cells (called antibody-dependent cell-mediated cytotoxicity, or ADCC), release of inflammatory mediators, placental transfer and control of immunoglobulin production.

[0263] Fc regions can be altered by replacing at least one amino acid residue with a different amino acid residue to alter the effector functions. For example, one or more amino acids can be replaced with a different amino acid residue such that the Fc region has an altered affinity for an effector ligand. The effector ligand to which affinity is altered can be, for example, an Fc receptor or the C1 component of complement. This approach is described in, e.g., U.S. Pat. Nos. 5,624,821 and 5,648,260, both by Winter et al. Modified Fc regions can also alter C1q binding and/or reduce or abolish complement dependent cytotoxicity (CDC). This approach is described in, e.g., U.S. Pat. No. 6,194,551 by Idusogie et al. Modified Fc regions can also alter the ability of an Fc region to fix complement. This approach is described in, e.g., the PCT Publication WO 94/29351 by Bodmer et al. Allotypic amino acid residues include, but are not limited to, constant region of a heavy chain of the IgG1, IgG2, and IgG3 subclasses as well as constant region of a light chain of the kappa isotype as described by Jefferis et al., 2009, MAbs, 1:332-338.

[0264] Fc regions can also be modified to “silence” the effector function, for example, to reduce or eliminate the ability of a CD19 binding molecule to mediate antibody dependent cellular cytotoxicity (ADCC) and/or antibody dependent cellular phagocytosis (ADCP). This can be achieved, for example, by introducing a mutation in an Fc region. Such mutations have been described in the art: LALA and N297A (Strohl, 2009, Curr. Opin. Biotechnol. 20(6):685-691); and D265A (Baudino et al., 2008, J. Immunol. 181: 6664-69; Strohl, supra). Examples of silent Fc IgG1 antibodies comprise the so-called LALA mutant comprising L234A and L235A mutation in the IgG1 Fc amino acid sequence. Another example of a silent IgG1 antibody comprises the D265A mutation. Another silent IgG1 antibody comprises the so-called DAPA mutant comprising D265A and P329A mutations in the IgG1 Fc amino acid sequence. Another silent IgG1 antibody comprises the N297A mutation, which results in aglycosylated/non-glycosylated antibodies.

[0265] Fc regions can be modified to increase the ability of a CD19 binding molecule containing the Fc region to mediate antibody dependent cellular cytotoxicity (ADCC) and/or antibody dependent cellular phagocytosis (ADCP), for example, by modifying one or more amino acid residues to increase the affinity of the CD19 binding molecule for an activating Fcγ receptor, or to decrease the affinity of the CD19 binding molecule for an inhibitory Fcγ receptor. Human activating Fcγ receptors include FcγRIa, FcγRIIa, FcγRIIIa, and FcγRIIIb, and human inhibitory Fcγ receptor includes FcγRIIb. This approach is described in, e.g., the PCT Publication WO 00/42072 by Presta. Moreover, binding sites on human IgG1 for FcγRI, FcγRII, FcγRIII and FcRn have been mapped and variants with improved binding have been described (see Shields et al., J. Biol. Chem. 276:6591-6604, 2001). Optimization of Fc-mediated effector functions of monoclonal antibodies such as increased ADCC/ADCP function has been described (see Strohl, 2009, Current Opinion in Biotechnology 20:685-691). Mutations that can enhance ADCC/ADCP function include one or more mutations selected from G236A, S239D, F243L, P2471, D280H, K290S, R292P, S298A, S298D, S298V, Y300L, V3051, A330L, 1332E, E333A, K334A, A339D, A339Q, A339T, and P396L (all positions by EU numbering).

[0266] Fc regions can also be modified to increase the ability of a CD19 binding molecule to mediate ADCC and/or ADCP, for example, by modifying one or more amino acids to increase the affinity of the CD19 binding molecule for an activating receptor that would typically not recognize the parent CD19 binding molecule, such as FcαRI. This approach is described in, e.g., Borrok et al., 2015, mAbs. 7(4):743-751.

[0267] Accordingly, in certain aspects, the CD19 binding molecules can include Fc domains with altered effector function such as, but not limited to, binding to Fc-receptors such as FcRn or leukocyte receptors (for example, as described above or in Section 7.2.2.1.1), binding to complement (for example as described above or in Section 7.2.2.1.2), modified disulfide bond architecture (for example as described above or in Section 7.2.2.1.3), or altered glycosylation patterns (for example as described above or in Section 7.2.2.1.4). The Fc domains can also be altered to include modifications that improve manufacturability of asymmetric CD19 binding molecules, for example by allowing heterodimerization, which is the preferential pairing of non-identical Fc regions over identical Fc regions. Heterodimerization permits the production of CD19 binding molecules in which different ABMs are connected to one another by an Fc domain containing Fc regions that differ in sequence. Examples of heterodimerization strategies are exemplified in Section 7.2.2.1.5 (and subsections thereof).

[0268] It will be appreciated that any of the modifications described in Sections 7.2.2.1.1 through 7.2.2.1.5 can be combined in any suitable manner to achieve the desired functional properties and/or combined with other modifications to alter the properties of the CD19 binding molecules. In some embodiments, a CD19 binding molecule comprises a IgG1 Fc domain having a mutation at 1, 2, 3, 4, 5, 6, or more than 6 of positions 233, 234, 235, 236, 237, 239, 265, 266, 267, 268, 269, 297, 299, 322, 327, 328, 329, 330, 331 and 332 (EU numbering). For example, a CD19 binding molecule can comprise an IgG1 sequence of SEQ ID NO:251 with a mutation at 1, 2, 3, 4, 5, 6, or more than 6 of positions 233, 234, 235, 236, 237, 239, 265, 266, 267, 268, 269, 297, 299, 322, 327, 328, 329, 330, 331 and 332.

[0269] In some embodiments, a CD19 binding molecule comprises a first and second human IgG1 Fc region having amino acid substitutions selected from the following combinations of substitutions: substitutions L234A, L235A, and G237A (“LALAGA”); substitutions L234A, L235A, S267K, and P329A (“LALASKPA”); subsitutions D265A, P329A, and S267K (“DAPASK”); substitutions G237A, D265A, and P329A (“GADAPA”); substitutions G237A, D265A, P329A, and S267K (“GADAPASK”); substitutions L234A, L235A, and P329G (“LALAPG”), and substitutions L234A, L235A, and P329A (“LALAPA”), wherein the amino acid residues are numbered according to the EU numbering system. It should be understood that the terms “LALAGA”, “LALASKPA”, “DAPASK”, “GADAPA”, “GADAPASK”, “LALAPG”, and “LALAPA” represent shorthand terminology for the different combinations of subsitutions described in this paragraph rather than contiguous amino acid sequences.

[0270] In another embodiment, a CD19 binding molecule comprises a human IgG1 Fc region having amino acid substitutions selected from the combinations of substitutions L234A, L235A, S267K, P329A (“LALASKPA”), or substitutions G237A, D265A, P329A, S267K (“GADAPASK”), wherein the amino acid residues are numbered according to the EU numbering system.

[0271] In a further embodiment, a CD19 binding molecules comprises a Fc region selected from FCV1-FCV7. (See Table A below)

[0272] In yet a further embodiment, a CD19 binding molecules comprises a Fc region which is FCV4 or FCV7.

[0273] In some aspects, the CD19 binding molecule has reduced or undetectable binding affinity to a Fc gamma receptor or C1q compared to a polypeptide comprising the wild-type human IgG1 Fc region optionally measured by surface plasmon resonance using a Biacore T200 instrument, wherein the Fc gamma receptor is selected from the group consisting of Fc gamma RIA, Fc gamma RIIIa V158 variant and Fc gamma RIIIa F158 variant, and wherein the binding compared to wildtype is reduced by 50%, 80%, 90%, 95%, 98%, 99% or is undetectable.

[0274] In some aspects, the CD19 binding molecule has reduced or undetectable effector function compared to a polypeptide comprising the wild-type human IgG1 Fc region.

[0275] In some aspects, the CD19 binding molecule is capable of binding to an antigen without triggering detectable antibody-dependent cell-mediated cytotoxicity (ADCC), antibody-dependent cellular phagocytosis (ADCP), or complement dependent cytotoxicity (CDC). In some aspects, the effector function to be reduced or diminished is antibody-dependent cell-mediated cytotoxicity (ADCC) in the individual. In some aspects, the effector function to be reduced or diminished is antibody-dependent cellular phagocytosis (ADCP) in the individual. In some aspects, the effector function to be reduced or diminished is complement dependent cytotoxicity (CDC) in the individual. In some aspects, the first and second Fc regions of a Fc domain each comprise a nucleic acid sequence selected from a nucleic acid sequence listed in Table A below, or any sequence having at least about 90%, 91% 92%, 93%, 94%, 95%, 96%, 97%, 98%, 99%, or 100% identity thereto.

[0276] In an embodiment, a nucleic acid encoding a Fc region comprises the nucleic acid sequence of FCV-7 (see Table A below), or a sequence having at least about 90%, 91% 92%, 93%, 94%, 95%, 96%, 97%, 98%, 99%, or 100% identity thereto. In an embodiment, a nucleic acid encoding a Fc region comprises the nucleic acid sequence of FCV-4 (see Table A below), or a sequence having at least about 90%, 91% 92%, 93%, 94%, 95%, 96%, 97%, 98%, 99%, or 100% identity thereto. In some aspects, a Fc domain comprises first and second Fc regions each of which comprises an amino acid sequence selected from an amino acid sequence listed in Table A below, or any sequence having at least about 90%, 91% 92%, 93%, 94%, 95%, 96%, 97%, 98%, 99%, or 100% identity thereto.

[0277] In an embodiment, a Fc domain comprises first and second Fc regions comprising the amino acid sequence of FCV-7 (see Table A below), or a sequence having at least about 90%, 91% 92%, 93%, 94%, 95%, 96%, 97%, 98%, 99%, or 100% identity thereto. In an embodiment, a Fc domain comprises first and second Fc regions comprising the amino acid sequence of FCV-4 (see Table A below), or a sequence having at least about 90%, 91% 92%, 93%, 94%, 95%, 96%, 97%, 98%, 99%, or 100% identity thereto.

[0278] Additionally provided herein are vectors comprising the polynucleotides encoding CD19 binding molecules comprising a Fc region selected from FCV1-FCV7. (See Table A below)

[0279] Also provided herein are host cells comprising vectors or polynucleotides encoding and capable of expressing CD19 binding molecules comprising a Fc region selected from FCV1-FCV7. (See Table A below).

TABLE A
Sequences of Fc variants

| SEQ ID | | |
|---|---|---|
| No | Description | Sequence |
| 1254 | FCV-1: Human IgG1 | apeaaggpsvflfppkpkdtlmisrtpevtcvvvdvshedpev |
| | Fc variant | kfnwyvdgvevhnaktkpreeqynstyrvvsvltvlhqdwlng |
| | L234A/L235A/P329A | keykckvsnkalaapiektiskakgqprepqvytlppsrdelt |
| | (LALAPA) | knqvsltclvkgfypsdiavewesngqpennykttppvldsdg |
| | Amino acid sequence | sfflyskltvdksrwqqgnvfscsvmhealhnhytqkslslsp |
| | | gk |
| 1255 | FCV-1: Human IgG1 | gcccctgaagccgccggcggaccctccgtgttcctgttccccc |
| | Fc variant | caaagcccaaggacaccctgatgatcagccggacccccgaagt |
| | L234A/L235A/P329A | gacctgcgtggtggtggacgtgtcccacgaggaccctgaagtg |
| | (LALAPA) | aagttcaattggtacgtggacggcgtggaagtgcacaacgcca |
| | Nucleic acid | agaccaagcccagagaggaacagtacaacagcacctaccgggt |
| | sequence | ggtgtccgtgctgaccgtgctgcaccaggactggctgaacggc |
| | | aaagagtacaagtgcaaagtctccaacaaggccctggccgccc |
| | | ccatcgagaaaaccatcagcaaggccaagggccagccccgcga |
| | | gccccaggtgtacacactgccccccagccgggacgagctgacc |
| | | aagaaccaggtgtccctgacctgcctggtcaagggcttctacc |
| | | ccagcgatatcgccgtggaatgggagagcaacggccagcccga |
| | | gaacaactacaagaccaccccccctgtgctggacagcgacggc |
| | | tcattcttcctgtacagcaagctgaccgtggacaagtcccggt |
| | | ggcagcagggcaacgtgttcagctgcagcgtgatgcacgaggc |
| | | cctgcacaaccactacacccagaagtccctgagcctgagcccc |
| | | ggcaaa |
| 1256 | FCV-2: Human IgG1 | apeaagapsvflfppkpkdtlmisrtpevtcvvvdvshedpev |
| | Fc variant | kfnwyvdgvevhnaktkpreeqynstyrvvsvltvlhqdwlng |
| | L234A/L235A/G237A | keykckvsnkalpapiektiskakgqprepqvytlppsrdelt |
| | (LALAGA) | knqvsltclvkgfypsdiavewesngqpennykttppvldsdg |
| | Amino acid sequence | sfflyskltvdksrwqqgnvfscsvmhealhnhytqkslslsp |
| | | gk |
| 1257 | FCV-2: Human IgG1 | gcccctgaagccgccggcgccccctccgtgttcctgttccccc |
| | Fc variant | caaagcccaaggacaccctgatgatcagccggacccccgaagt |
| | L234A/L235A/G237A | gacctgcgtggtggtggacgtgtcccacgaggaccctgaagtg |
| | (LALAGA) | aagttcaattggtacgtggacggcgtggaagtgcacaacgcca |
| | Nucleic acid | agaccaagcccagagaggaacagtacaacagcacctaccgggt |
| | sequence | ggtgtccgtgctgaccgtgctgcaccaggactggctgaacggc |
| | | aaagagtacaagtgcaaagtctccaacaaggccctgcctgccc |
| | | ccatcgagaaaaccatcagcaaggccaagggccagccccgcga |
| | | gccccaggtgtacacactgccccccagccgggacgagctgacc |
| | | aagaaccaggtgtccctgacctgcctggtcaagggcttctacc |
| | | ccagcgatatcgccgtggaatgggagagcaacggccagcccga |
| | | gaacaactacaagaccaccccccctgtgctggacagcgacggc |
| | | tcattcttcctgtacagcaagctgaccgtggacaagtcccggt |
| | | ggcagcagggcaacgtgttcagctgcagcgtgatgcacgaggc |
| | | cctgcacaaccactacacccagaagtccctgagcctgagcccc |
| | | ggcaaa |
| 1258 | FCV-3: Human IgG1 | apeaaggpsvflfppkpkdtlmisrtpevtcvvvdvshedpev |
| | Fc variant | kfnwyvdgvevhnaktkpreeqynstyrvvsvltvlhqdwlng |
| | L234A/L235A/P329G | keykckvsnkalgapiektiskakgqprepqvytlppsrdelt |
| | (LALAPG) | knqvsltclvkgfypsdiavewesngqpennykttppvldsdg |
| | Amino acid sequence | sfflyskltvdksrwqqgnvfscsvmhealhnhytqkslslsp |
| | | gk |
| 1259 | FCV-3: Human IgG1 | gcccctgaagccgccggcggaccctccgtgttcctgttccccc |
| | Fc variant | caaagcccaaggacaccctgatgatcagccggacccccgaagt |
| | L234A/L235A/P329G | gacctgcgtggtggtggacgtgtcccacgaggaccctgaagtg |
| | (LALAPG) | aagttcaattggtacgtggacggcgtggaagtgcacaacgcca |
| | Nucleic acid | agaccaagcccagagaggaacagtacaacagcacctaccgggt |
| | sequence | ggtgtccgtgctgaccgtgctgcaccaggactggctgaacggc |
| | | aaagagtacaagtgcaaagtctccaacaaggccctgggcgccc |
| | | ccatcgagaaaaccatcagcaaggccaagggccagccccgcga |
| | | gccccaggtgtacacactgccccccagccgggacgagctgacc |
| | | aagaaccaggtgtccctgacctgcctggtcaagggcttctacc |
| | | ccagcgatatcgccgtggaatgggagagcaacggccagcccga |
| | | gaacaactacaagaccaccccccctgtgctggacagcgacggc |
| | | tcattcttcctgtacagcaagctgaccgtggacaagtcccggt |
| | | ggcagcagggcaacgtgttcagctgcagcgtgatgcacgaggc |
| | | cctgcacaaccactacacccagaagtccctgagcctgagcccc |
| | | ggcaaa |
| 1260 | FCV-4: Human IgG1 | apeaaggpsvflfppkpkdtlmisrtpevtcvvvdvkhedpev |
| | Fc variant | kfnwyvdgvevhnaktkpreeqynstyrvvsvltvlhqdwlng |
| | L234A/L235A/S267K/ | keykckvsnkalaapiektiskakgqprepqvytlppsrdelt |
| | P329A (LALASKPA) | knqvsltclvkgfypsdiavewesngqpennykttppvldsdg |
| | Amino acid sequence | sfflyskltvdksrwqqgnvfscsvmhealhnhytqkslslsp |
| | | gk |
| 1261 | FCV-4: Human IgG1 | gcccctgaagccgccggcggaccctccgtgttcctgttccccc |
| | Fc variant | caaagcccaaggacaccctgatgatcagccggacccccgaagt |
| | L234A/L235A/S267K/ | gacctgcgtggtggtggacgtgaagcacgaggaccctgaagtg |
| | P329A (LALASKPA) | aagttcaattggtacgtggacggcgtggaagtgcacaacgcca |
| | Nucleic acid | agaccaagcccagagaggaacagtacaacagcacctaccgggt |
| | sequence | ggtgtccgtgctgaccgtgctgcaccaggactggctgaacggc |
| | | aaagagtacaagtgcaaagtctccaacaaggccctggccgccc |
| | | ccatcgagaaaaccatcagcaaggccaagggccagccccgcga |
| | | gccccaggtgtacacactgccccccagccgggacgagctgacc |
| | | aagaaccaggtgtccctgacctgcctggtcaagggcttctacc |
| | | ccagcgatatcgccgtggaatgggagagcaacggccagcccga |
| | | gaacaactacaagaccaccccccctgtgctggacagcgacggc |
| | | tcattcttcctgtacagcaagctgaccgtggacaagtcccggt |
| | | ggcagcagggcaacgtgttcagctgcagcgtgatgcacgaggc |
| | | cctgcacaaccactacacccagaagtccctgagcctgagcccc |
| | | ggcaaa |
| 1262 | FCV-5: Human IgG1 | apellggpsvflfppkpkdtlmisrtpevtcvvvavkhedpev |
| | Fc variant | kfnwyvdgvevhnaktkpreeqynstyrvvsvltvlhqdwlng |
| | D265A/P329A/S267K | keykckvsnkalaapiektiskakgqprepqvytlppsrdelt |
| | (DAPASK) | knqvsltclvkgfypsdiavewesngqpennykttppvldsdg |
| | Amino acid sequence | sfflyskltvdksrwqqgnvfscsvmhealhnhytqkslslsp |
| | | gk |
| 1263 | FCV-5: Human IgG1 | gcccctgaactgctgggcggaccctccgtgttcctgttccccc |
| | Fc variant | caaagcccaaggacaccctgatgatcagccggacccccgaagt |
| | D265A/P329A/S267K | gacctgcgtggtggtggccgtgaagcacgaggaccctgaagtg |
| | (DAPASK) | aagttcaattggtacgtggacggcgtggaagtgcacaacgcca |
| | Nucleic acid | agaccaagcccagagaggaacagtacaacagcacctaccgggt |
| | sequence | ggtgtccgtgctgaccgtgctgcaccaggactggctgaacggc |
| | | aaagagtacaagtgcaaagtctccaacaaggccctggccgccc |
| | | ccatcgagaaaaccatcagcaaggccaagggccagccccgcga |
| | | gccccaggtgtacacactgccccccagccgggacgagctgacc |
| | | aagaaccaggtgtccctgacctgcctggtcaagggcttctacc |
| | | ccagcgatatcgccgtggaatgggagagcaacggccagcccga |
| | | gaacaactacaagaccaccccccctgtgctggacagcgacggc |
| | | tcattcttcctgtacagcaagctgaccgtggacaagtcccggt |
| | | ggcagcagggcaacgtgttcagctgcagcgtgatgcacgaggc |
| | | cctgcacaaccactacacccagaagtccctgagcctgagcccc |
| | | ggcaaa |
| 1264 | FCV-6: Human IgG1 | apellgapsvflfppkpkdtlmisrtpevtcvvvavshedpev |
| | Fc variant | kfnwyvdgvevhnaktkpreeqynstyrvvsvltvlhqdwlng |
| | G237A/D265A/P329A | keykckvsnkalaapiektiskakgqprepqvytlppsrdelt |
| | (GADAPA) | knqvsltclvkgfypsdiavewesngqpennykttppvldsdg |
| | Amino acid sequence | sfflyskltvdksrwqqgnvfscsvmhealhnhytqkslslsp |
| | | gk |
| 1265 | FCV-6: Human IgG1 | gcccctgaactgctgggcgccccctccgtgttcctgttccccc |
| | Fc variant | caaagcccaaggacaccctgatgatcagccggacccccgaagt |
| | G237A/D265A/P329A | gacctgcgtggtggtggccgtgtcccacgaggaccctgaagtg |
| | (GADAPA) | aagttcaattggtacgtggacggcgtggaagtgcacaacgcca |
| | Nucleic acid | agaccaagcccagagaggaacagtacaacagcacctaccgggt |
| | sequence | ggtgtccgtgctgaccgtgctgcaccaggactggctgaacggc |
| | | aaagagtacaagtgcaaagtctccaacaaggccctggccgccc |
| | | ccatcgagaaaaccatcagcaaggccaagggccagccccgcga |
| | | gccccaggtgtacacactgccccccagccgggacgagctgacc |
| | | aagaaccaggtgtccctgacctgcctggtcaagggcttctacc |
| | | ccagcgatatcgccgtggaatgggagagcaacggccagcccga |
| | | gaacaactacaagaccaccccccctgtgctggacagcgacggc |
| | | tcattcttcctgtacagcaagctgaccgtggacaagtcccggt |
| | | ggcagcagggcaacgtgttcagctgcagcgtgatgcacgaggc |
| | | cctgcacaaccactacacccagaagtccctgagcctgagcccc |
| | | ggcaaa |
| 1266 | FCV-7: Human IgG1 | apellgapsvflfppkpkdtlmisrtpevtcvvvavkhedpev |
| | Fc variant | kfnwyvdgvevhnaktkpreeqynstyrvvsvltvlhqdwlng |
| | G237A/D265A/P329A/ | keykckvsnkalaapiektiskakgqprepqvytlppsrdelt |
| | S267K (GADAPASK) | knqvsltclvkgfypsdiavewesngqpennykttppvldsdg |
| | Amino acid sequence | sfflyskltvdksrwqqgnvfscsvmhealhnhytqkslslsp |
| | | gk |
| 1267 | FCV-7: Human IgG1 | gcccctgaactgctgggcgccccctccgtgttcctgttccccc |
| | Fc variant | caaagcccaaggacaccctgatgatcagccggacccccgaagt |
| | G237A/D265A/P329A/ | gacctgcgtggtggtggccgtgaagcacgaggaccctgaagtg |
| | S267K (GADAPASK) | aagttcaattggtacgtggacggcgtggaagtgcacaacgcca |
| | Nucleic acid | agaccaagcccagagaggaacagtacaacagcacctaccgggt |
| | sequence | ggtgtccgtgctgaccgtgctgcaccaggactggctgaacggc |
| | | aaagagtacaagtgcaaagtctccaacaaggccctggccgccc |
| | | ccatcgagaaaaccatcagcaaggccaagggccagccccgcga |
| | | gccccaggtgtacacactgccccccagccgggacgagctgacc |
| | | aagaaccaggtgtccctgacctgcctggtcaagggcttctacc |
| | | ccagcgatatcgccgtggaatgggagagcaacggccagcccga |
| | | gaacaactacaagaccaccccccctgtgctggacagcgacggc |
| | | tcattcttcctgtacagcaagctgaccgtggacaagtcccggt |
| | | ggcagcagggcaacgtgttcagctgcagcgtgatgcacgaggc |
| | | cctgcacaaccactacacccagaagtccctgagcctgagcccc |
| | | ggcaaa |

TABLE B
Sequences of Antibodies and Fc variants

| SEQ ID | | |
|---|---|---|
| No | Description | Sequence |
| 1268 | FCV-8: Human IgG1 | apellggpsvflfppkpkdtlmisrtpevtcvvvavshedpev |
| | Fc variant | kfnwyvdgvevhnaktkpreeqynstyrvvsvltvlhqdwlng |
| | D265A/P329A | keykckvsnkalaapiektiskakgqprepqvytlppsrdelt |
| | (DAPA) | knqvsltclvkgfypsdiavewesngqpennykttppvldsdg |
| | Amino acid | sfflyskltvdksrwqqgnvfscsvmhealhnhytqkslslsp |
| | sequence | gk |
| 1269 | FCV-8: Human IgG1 | gcccctgaactgctgggcggaccctccgtgttcctgttccccc |
| | Fc variant | caaagcccaaggacaccctgatgatcagccggacccccgaagt |
| | D265A/P329A | gacctgcgtggtggtggccgtgtcccacgaggaccctgaagtg |
| | (DAPA) | aagttcaattggtacgtggacggcgtggaagtgcacaacgcca |
| | Nucleic acid | agaccaagcccagagaggaacagtacaacagcacctaccgggt |
| | sequence | ggtgtccgtgctgaccgtgctgcaccaggactggctgaacggc |
| | | aaagagtacaagtgcaaagtctccaacaaggccctggccgccc |
| | | ccatcgagaaaaccatcagcaaggccaagggccagccccgcga |
| | | gccccaggtgtacacactgccccccagccgggacgagctgacc |
| | | aagaaccaggtgtccctgacctgcctggtcaagggcttctacc |
| | | ccagcgatatcgccgtggaatgggagagcaacggccagcccga |
| | | gaacaactacaagaccaccccccctgtgctggacagcgacggc |
| | | tcattcttcctgtacagcaagctgaccgtggacaagtcccggt |
| | | ggcagcagggcaacgtgttcagctgcagcgtgatgcacgaggc |
| | | cctgcacaaccactacacccagaagtccctgagcctgagcccc |
| | | ggcaaa |
| 1270 | FCV-9: Human IgG1 | apellggpsvflfppkpkdtlmisrtpevtcvvvavshedpev |
| | Fc variant | kfnwyvdgvevhnaktkpreeqyastyrvvsvltvlhqdwlng |
| | D265A/N297A/P329A | keykckvsnkalaapiektiskakgqprepqvytlppsrdelt |
| | (DANAPA) | knqvsltclvkgfypsdiavewesngqpennykttppvldsdg |
| | Amino acid | sfflyskltvdksrwqqgnvfscsvmhealhnhytqkslslsp |
| | sequence | gk |
| 1271 | FCV-9: Human IgG1 | gcccctgaactgctgggaggccctagcgtgttcctgttccccc |
| | Fc variant | caaagcccaaggacaccctgatgatcagccggacccccgaagt |
| | D265A/N297A/P329A | gacctgtgtggtggtggccgtgtctcacgaggaccctgaagtg |
| | (DANAPA) | aagtttaattggtacgtggacggcgtggaagtgcacaacgcca |
| | Nucleic acid | agaccaagcccagagaggaacagtacgccagcacctaccgggt |
| | sequence | ggtgtccgtgctgacagtgctgcaccaggactggctgaacggc |
| | | aaagagtacaagtgcaaggtgtccaacaaggccctggccgctc |
| | | ccatcgagaaaaccatcagcaaggccaagggccagccccgcga |
| | | accccaggtgtacacactgccccctagcagggacgagctgacc |
| | | aagaaccaggtgtccctgacctgcctcgtgaagggcttctacc |
| | | cctccgatatcgccgtggaatgggagagcaacggccagcccga |
| | | gaacaactacaagaccaccccccctgtgctggactccgacggc |
| | | tcattcttcctgtacagcaagctgaccgtggacaagtcccggt |
| | | ggcagcagggcaacgtgttcagctgctccgtgatgcacgaggc |
| | | cctgcacaaccactacacccagaagtccctgagcctgagcccc |
| | | ggcaaa |
| 1272 | Anti-CD3 human | evqlvesggglvqpggslklscaasgftfntyamnwvrqasgk |
| | IgG1 Heavy Chain | glewvgrirskynnyatyyadsvkdrftisrddskstlylqmn |
| | Amino acid | slktedtavyycvrhgnfgnsyvswfaywgqgtlvtvssastk |
| | sequence | gpsvfplapsskstsggtaalgclvkdyfpepvtvswnsgalt |
| | | sgvhtfpavlqssglyslssvvtvpssslgtqtyicnvnhkps |
| | | ntkvdkrvepkscdkthtcppcpapellggpsvflfppkpkdt |
| | | lmisrtpevtcvvvdvshedpevkfnwyvdgvevhnaktkpre |
| | | eqynstyrvvsvltvlhqdwlngkeykckvsnkalpapiekti |
| | | skakgqprepqvytlppsrdeltknqvsltclvkgfypsdiav |
| | | ewesngqpennykttppvldsdgsfflyskltvdksrwqqgnv |
| | | fscsvmhealhnhytqkslslspgk |
| 1273 | Anti-CD3 human | gaagtgcagctggtggaatctggcggcggactggtgcagcctg |
| | IgG1 Heavy Chain | gcggatctctgaagctgagctgtgccgccagcggcttcacctt |
| | Nucleic acid | caacacctacgccatgaactgggtgcgccaggcctctggcaag |
| | sequence | ggcctggaatgggtgggacggatcagaagcaagtacaacaatt |
| | | acgccacctactacgccgacagcgtgaaggaccggttcaccat |
| | | cagccgggacgacagcaagagcaccctgtacctgcagatgaac |
| | | agcctgaaaaccgaggacaccgccgtgtactactgcgtgcggc |
| | | acggcaacttcggcaacagctatgtgtcttggtttgcctactg |
| | | gggccagggcaccctcgtgacagtgagctcagctagcaccaag |
| | | ggccccagcgtgttccccctggcgcccagcagcaagagcacca |
| | | gcggcggcacagccgccctgggctgcctggtgaaggactactt |
| | | ccccgagccagtgaccgtgtcctggaacagcggagccctgacc |
| | | tccggcgtgcacaccttccccgccgtgctgcagagcagcggcc |
| | | tgtacagcctgagcagcgtggtgaccgtgcccagcagcagcct |
| | | gggcacccagacctacatctgcaacgtgaaccacaagcccagc |
| | | aacaccaaggtggacaagagagtggagcccaagagctgcgaca |
| | | agacccacacctgccccccctgtcctgcccctgaactgctggg |
| | | cggaccctccgtgttcctgttccccccaaagcccaaggacacc |
| | | ctgatgatcagccggacccccgaagtgacctgcgtggtggtgg |
| | | acgtgtcccacgaggaccctgaagtgaagttcaattggtacgt |
| | | ggacggcgtggaagtgcacaacgccaagaccaagcccagagag |
| | | gaacagtacaacagcacctaccgggtggtgtccgtgctgaccg |
| | | tgctgcaccaggactggctgaacggcaaagagtacaagtgcaa |
| | | agtctccaacaaggccctgcctgcccccatcgagaaaaccatc |
| | | agcaaggccaagggccagccccgcgagccccaggtgtacacac |
| | | tgccccccagccgggacgagctgaccaagaaccaggtgtccct |
| | | gacctgcctggtcaagggcttctaccccagcgatatcgccgtg |
| | | gaatgggagagcaacggccagcccgagaacaactacaagacca |
| | | ccccccctgtgctggacagcgacggctcattcttcctgtacag |
| | | caagctgaccgtggacaagtcccggtggcagcagggcaacgtg |
| | | ttcagctgcagcgtgatgcacgaggccctgcacaaccactaca |
| | | cccagaagtccctgagcctgagccccggcaaa |
| 1274 | Anti-CD3 human | evqlvesggglvqpggslklscaasgftfntyamnwvrqasgk |
| | IgG1 | glewvgrirskynnyatyyadsvkdrftisrddskstlylqmn |
| | R214K allotype | slktedtavyycvrhgnfgnsyvswfaywgqgtlvtvssastk |
| | Heavy Chain | gpsvfplapsskstsggtaalgclvkdyfpepvtvswnsgalt |
| | Amino acid | sgvhtfpavlqssglyslssvvtvpssslgtqtyicnvnhkps |
| | sequence | ntkvdkkvepkscdkthtcppcpapellggpsvflfppkpkdt |
| | | lmisrtpevtcvvvdvshedpevkfnwyvdgvevhnaktkpre |
| | | eqynstyrvvsvltvlhqdwlngkeykckvsnkalpapiekti |
| | | skakgqprepqvytlppsrdeltknqvsltclvkgfypsdiav |
| | | ewesngqpennykttppvldsdgsfflyskltvdksrwqqgnv |
| | | fscsvmhealhnhytqkslslspgk |
| 1275 | Anti-CD3 human | gaagtgcagctggtggaatctggcggcggactggtgcagcctg |
| | IgG1 | gcggatctctgaagctgagctgtgccgccagcggcttcacctt |
| | R214K allotype | caacacctacgccatgaactgggtgcgccaggcctctggcaag |
| | Heavy Chain | ggcctggaatgggtgggacggatcagaagcaagtacaacaatt |
| | Nucleic acid | acgccacctactacgccgacagcgtgaaggaccggttcaccat |
| | sequence | cagccgggacgacagcaagagcaccctgtacctgcagatgaac |
| | | agcctgaaaaccgaggacaccgccgtgtactactgcgtgcggc |
| | | acggcaacttcggcaacagctatgtgtcttggtttgcctactg |
| | | gggccagggcaccctcgtgacagtgagctcagctagcaccaag |
| | | ggccccagcgtgttccccctggcgcccagcagcaagagcacca |
| | | gcggcggcacagccgccctgggctgcctggtgaaggactactt |
| | | ccccgagccagtgaccgtgtcctggaacagcggagccctgacc |
| | | tccggcgtgcacaccttccccgccgtgctgcagagcagcggcc |
| | | tgtacagcctgagcagcgtggtgaccgtgcccagcagcagcct |
| | | gggcacccagacctacatctgcaacgtgaaccacaagcccagc |
| | | aacaccaaggtggacaagaaggtggagcccaagagctgcgaca |
| | | agacccacacctgccccccctgtcctgcccctgaactgctggg |
| | | cggaccctccgtgttcctgttccccccaaagcccaaggacacc |
| | | ctgatgatcagccggacccccgaagtgacctgcgtggtggtgg |
| | | acgtgtcccacgaggaccctgaagtgaagttcaattggtacgt |
| | | ggacggcgtggaagtgcacaacgccaagaccaagcccagagag |
| | | gaacagtacaacagcacctaccgggtggtgtccgtgctgaccg |
| | | tgctgcaccaggactggctgaacggcaaagagtacaagtgcaa |
| | | agtctccaacaaggccctgcctgcccccatcgagaaaaccatc |
| | | agcaaggccaagggccagccccgcgagccccaggtgtacacac |
| | | tgccccccagccgggacgagctgaccaagaaccaggtgtccct |
| | | gacctgcctggtcaagggcttctaccccagcgatatcgccgtg |
| | | gaatgggagagcaacggccagcccgagaacaactacaagacca |
| | | ccccccctgtgctggacagcgacggctcattcttcctgtacag |
| | | caagctgaccgtggacaagtcccggtggcagcagggcaacgtg |
| | | ttcagctgcagcgtgatgcacgaggccctgcacaaccactaca |
| | | cccagaagtccctgagcctgagccccggcaaa |
| 1276 | Anti-CD3 human | qavvtqepsltvspggtvtltcrsstgavttsnyanwvqqkpg |
| | Light Chain | qaprgliggtnkrapwtparfsgsllgdkaaltlsgaqpedea |
| | Amino acid | eyfcalwysnlwvfgggtkltvlgqpkaapsvtlfppsseelq |
| | sequence | ankatlvclisdfypgavtvawkadsspvkagvetttpskqsn |
| | | nkyaassylsltpeqwkshrsyscqvthegstvektvaptecs |
| 1277 | Anti-CD3 human | caggctgtcgtgacccaggaacctagcctgaccgtgtctcctg |
| | Light Chain | gcggaaccgtgaccctgacctgtagatctagcacaggcgccgt |
| | Nucleic acid | gaccaccagcaactacgccaattgggtgcagcagaagcccggc |
| | sequence | caggctcctagaggactgatcggcggcaccaacaagagagccc |
| | | cttggacccctgccagattcagcggctctctgctgggagataa |
| | | ggccgccctgacactgtctggcgcccagcctgaggatgaggcc |
| | | gagtacttttgcgccctgtggtacagcaacctgtgggtgttcg |
| | | gcggaggcaccaagctgaccgtgctgggccagcctaaggccgc |
| | | tccctccgtgaccctgttcccccccagctccgaggaactgcag |
| | | gccaacaaggccaccctggtgtgcctgatcagcgacttctacc |
| | | ctggcgccgtgaccgtggcctggaaggccgacagcagccccgt |
| | | gaaggccggcgtggagacaaccacccccagcaagcagagcaac |
| | | aacaagtacgccgccagcagctacctgagcctgacccccgagc |
| | | agtggaagagccacagaagctacagctgccaggtcacccacga |
| | | gggcagcaccgtggagaaaaccgtggcccccaccgagtgcagc |

7.2.2.1.1. Fc Domains with Altered FcR Binding

[0280] The Fc domains of the CD19 binding molecules can show altered binding to one or more Fc-receptors (FcRs) in comparison with the corresponding native immunoglobulin. The binding to any particular Fc-receptor can be increased or decreased. In one embodiment, the Fc domain comprises one or more modifications which alter its Fc-receptor binding profile.

[0281] Human cells can express a number of membrane bound FcRs selected from FcαR, FcεR, FcγR, FcRn and glycan receptors. Some cells are also capable of expressing soluble (ectodomain) FcR (Fridman et al., 1993, J Leukocyte Biology 54: 504-512). FcγR can be further divided by affinity of IgG binding (high/low) and biological effect (activating/inhibiting). Human FcγRI is widely considered to be the sole ‘high affinity’ receptor whilst all of the others are considered as medium to low. FcγRIIb is the sole receptor with ‘inhibitory’ functionality by virtue of its intracellular ITIM motif whilst all of the others are considered as ‘activating’ by virtue of ITAM motifs or pairing with the common FcγR-γ chain. FcγRIIIb is also unique in that although activatory it associates with the cell via a GPI anchor. In total, humans express six “standard” FcγRs: FcγRI, FcγRIIa, FcγRIIb, FcγRIIc, FcγRIIIa, and FcγRIIIb. In addition to these sequences there are a large number of sequence or allotypic variants spread across these families. Some of these have been found to have important functional consequence and so are sometimes considered to be receptor sub-types of their own. Examples include FcγRIIa^{H134R}, FcγRIIb^{I190T}, FcγRIIIa^{F158V}, FcγRIIIb^{NA1}, FcγRIIIb^{NA2}, and FcγRIII^{SH}. Each receptor sequence has been shown to have different affinities for the 4 sub-classes of IgG: IgG1, IgG2, IgG3 and IgG4 (Bruhns, 1993, Blood 113:3716-3725). Other species have somewhat different numbers and functionality of FcγR, with the mouse system being the best studied to date and comprising of 4 FcγR, FcγRI FcγRIIb FcγRIII FcγRIV (Bruhns, 2012, Blood 119:5640-5649). Human FcγRI on cells is normally considered to be “occupied” by monomeric IgG in normal serum conditions due to its affinity for IgG1/IgG3/IgG4 (about 10⁻⁸ M) and the concentration of these IgG in serum (about 10 mg/ml). Hence cells bearing FcγRI on their surface are considered to be capable for “screening” or “sampling” of their antigenic environment vicariously through the bound polyspecific IgG. The other receptors having lower affinities for IgG sub-classes (in the range of about 10⁻⁵-10⁻⁷ M) are normally considered to be “unoccupied.” The low affinity receptors are hence inherently sensitive to the detection of and activation by antibody involved immune complexes. The increased Fc density in an antibody immune complex results in increased functional affinity of binding avidity to low affinity FcγR. This has been demonstrated in vitro using a number of methods (Shields et al., 2001, J Biol Chem 276(9):6591-6604; Lux et al., 2013, J Immunol 190:4315-4323). It has also been implicated as being one of the primary modes of action in the use of anti-RhD to treat ITP in humans (Crow, 2008, Transfusion Medicine Reviews 22:103-116).

[0282] Many cell types express multiple types of FcγR and so binding of IgG or antibody immune complex to cells bearing FcγR can have multiple and complex outcomes depending upon the biological context. Most simply, cells can either receive an activatory, inhibitory or mixed signal. This can result in events such as phagocytosis (e.g., macrophages and neutrophils), antigen processing (e.g., dendritic cells), reduced IgG production (e.g., B-cells) or degranulation (e.g., neutrophils, mast cells). There are data to support that the inhibitory signal from FcγRIIb can dominate that of activatory signals (Proulx, 2010, Clinical Immunology 135:422-429).

[0283] There are a number of useful Fc substitutions that can be made to alter binding to one or more of the FcγR receptors. Substitutions that result in increased binding as well as decreased binding can be useful. For example, it is known that increased binding to FcγRIIIa generally results in increased ADCC (antibody dependent cell-mediated cytotoxicity; the cell-mediated reaction where nonspecific cytotoxic cells that express FcγRs recognize bound antibody on a target cell and subsequently cause lysis of the target cell). Similarly, decreased binding to FcγRIIb (an inhibitory receptor) can be beneficial as well in some circumstances. Amino acid substitutions that find use in the present disclosure include those listed in US 2006/0024298 (particularly FIG. 41), US 2006/0121032, US 2006/0235208, US 2007/0148170, and US 2019/0100587. Particular variants that find use include, but are not limited to, 236A, 239D, 239E, 332E, 332D, 239D/332E, 267D, 267E, 328F, 267E/328F, 236A/332E, 239D/332E/330Y, 239D, 332E/330L, 243A, 243L, 264A, 264V, 299T, 265A/297A/329A, 265N/297D/329G, and 265E/297Q/329S.

[0284] FcRn has a crucial role in maintaining the long half-life of IgG in the serum of adults and children. The receptor binds IgG in acidified vesicles (pH<6.5) protecting the IgG molecule from degradation, and then releasing it at the higher pH of 7.4 in blood.

[0285] FcRn is unlike leukocyte Fc receptors, and instead, has structural similarity to MHC class I molecules. It is a heterodimer composed of a β₂-microglobulin chain, non-covalently attached to a membrane-bound chain that includes three extracellular domains. One of these domains, including a carbohydrate chain, together with β₂-microglobulin interacts with a site between the CH2 and CH3 domains of Fc. The interaction includes salt bridges made to histidine residues on IgG that are positively charged at pH<6.5. At higher pH, the His residues lose their positive charges, the FcRn-IgG interaction is weakened and IgG dissociates.

[0286] In one embodiment, a CD19 binding molecule comprises an Fc domain that binds to human FcRn.

[0287] In one embodiment, the Fc domain has an Fc region(s) (e.g., one or two) comprising a histidine residue at position 310, and in some cases also at position 435. These histidine residues are important for human FcRn binding. In one embodiment, the histidine residues at positions 310 and 435 are native residues, i.e., positions 310 and 435 are not modified. Alternatively, one or both of these histidine residues can be present as a result of a modification.

[0288] The CD19 binding molecules can comprise one or more Fc regions that alter Fc binding to FcRn. The altered binding can be increased binding or decreased binding.

[0289] In one embodiment, the CD19 binding molecule comprises an Fc domain in which at least one (and optionally both) Fc regions comprises one or more modifications such that it binds to FcRn with greater affinity and avidity than the corresponding native immunoglobulin.

[0290] Fc substitutions that increase binding to the FcRn receptor and increase serum half life are described in US 2009/0163699, including, but not limited to, 434S, 434A, 428L, 308F, 2591, 428L/434S, 2591/308F, 4361/428L, 4361 or V/434S, 436V/428L and 2591/308F/428L.

[0291] In one embodiment, the Fc region is modified by substituting the threonine residue at position 250 with a glutamine residue (T250Q).

[0292] In one embodiment, the Fc region is modified by substituting the methionine residue at position 252 with a tyrosine residue (M252Y)

[0293] In one embodiment, the Fc region is modified by substituting the serine residue at position 254 with a threonine residue (S254T).

[0294] In one embodiment, the Fc region is modified by substituting the threonine residue at position 256 with a glutamic acid residue (T256E).

[0295] In one embodiment, the Fc region is modified by substituting the threonine residue at position 307 with an alanine residue (T307A).

[0296] In one embodiment, the Fc region is modified by substituting the threonine residue at position 307 with a proline residue (T307P).

[0297] In one embodiment, the Fc region is modified by substituting the valine residue at position 308 with a cysteine residue (V308C).

[0298] In one embodiment, the Fc region is modified by substituting the valine residue at position 308 with a phenylalanine residue (V308F).

[0299] In one embodiment, the Fc region is modified by substituting the valine residue at position 308 with a proline residue (V308P).

[0300] In one embodiment, the Fc region is modified by substituting the glutamine residue at position 311 with an alanine residue (Q311A).

[0301] In one embodiment, the Fc region is modified by substituting the glutamine residue at position 311 with an arginine residue (Q311R).

[0302] In one embodiment, the Fc region is modified by substituting the methionine residue at position 428 with a leucine residue (M428L).

[0303] In one embodiment, the Fc region is modified by substituting the histidine residue at position 433 with a lysine residue (H433K).

[0304] In one embodiment, the Fc region is modified by substituting the asparagine residue at position 434 with a phenylalanine residue (N434F).

[0305] In one embodiment, the Fc region is modified by substituting the asparagine residue at position 434 with a tyrosine residue (N434Y).

[0306] In one embodiment, the Fc region is modified by substituting the methionine residue at position 252 with a tyrosine residue, the serine residue at position 254 with a threonine residue, and the threonine residue at position 256 with a glutamic acid residue (M252Y/S254T/T256E).

[0307] In one embodiment, the Fc region is modified by substituting the valine residue at position 308 with a proline residue and the asparagine residue at position 434 with a tyrosine residue (V308P/N434Y).

[0308] In one embodiment, the Fc region is modified by substituting the methionine residue at position 252 with a tyrosine residue, the serine residue at position 254 with a threonine residue, the threonine residue at position 256 with a glutamic acid residue, the histidine residue at position 433 with a lysine residue and the asparagine residue at position 434 with a phenylalanine residue (M252Y/S254T/T256E/H433K/N434F).

[0309] It will be appreciated that any of the modifications listed above can be combined to alter FcRn binding.

[0310] In one embodiment, the CD19 binding molecule comprises an Fc domain in which one or both Fc regions comprise one or more modifications such that the Fc domain binds to FcRn with lower affinity and avidity than the corresponding native immunoglobulin.

[0311] In one embodiment, the Fc region comprises any amino acid residue other than histidine at position 310 and/or position 435.

[0312] The CD19 binding molecule can comprise an Fc domain in which one or both Fc regions comprise one or more modifications which increase its binding to FcγRIIb. FcγRIIb is the only inhibitory receptor in humans and the only Fc receptor found on B cells.

[0313] In one embodiment, the Fc region is modified by substituting the proline residue at position 238 with an aspartic acid residue (P238D).

[0314] In one embodiment, the Fc region is modified by substituting the glutamic acid residue at position 258 with an alanine residue (E258A).

[0315] In one embodiment, the Fc region is modified by substituting the serine residue at position 267 with an alanine residue (S267A).

[0316] In one embodiment, the Fc region is modified by substituting the serine residue at position 267 with a glutamic acid residue (S267E).

[0317] In one embodiment, the Fc region is modified by substituting the leucine residue at position 328 with a phenylalanine residue (L328F).

[0318] In one embodiment, the Fc region is modified by substituting the glutamic acid residue at position 258 with an alanine residue and the serine residue at position 267 with an alanine residue (E258A/S267A).

[0319] In one embodiment, the Fc region is modified by substituting the serine residue at position 267 with a glutamic acid residue and the leucine residue at position 328 with a phenylalanine residue (S267E/L328F).

[0320] It will be appreciated that any of the modifications listed above can be combined to increase FcγRIIb binding.

[0321] In one embodiment, CD19 binding molecules are provided comprising Fc domains which display decreased binding to FcγR.

[0322] In one embodiment, the CD19 binding molecule comprises an Fc domain in which one or both Fc regions comprise one or more modifications that decrease Fc binding to FcγR.

[0323] The Fc domain can be derived from IgG1.

[0324] In one embodiment, the Fc region is modified by substituting the leucine residue at position 234 with an alanine residue (L234A).

[0325] In one embodiment, the Fc region is modified by substituting the leucine residue at position 235 with an alanine residue (L235A).

[0326] In one embodiment, the Fc region is modified by substituting the glycine residue at position 236 with an arginine residue (G236R).

[0327] In one embodiment, the Fc region is modified by substituting the asparagine residue at position 297 with an alanine residue (N297A) or a glutamine residue (N297Q).

[0328] In one embodiment, the Fc region is modified by substituting the serine residue at position 298 with an alanine residue (S298A).

[0329] In one embodiment, the Fc region is modified by substituting the leucine residue at position 328 with an arginine residue (L328R).

[0330] In one embodiment, the Fc region is modified by substituting the leucine residue at position 234 with an alanine residue and the leucine residue at position 235 with an alanine residue (L234A/L235A).

[0331] In one embodiment, the Fc region is modified by substituting the phenylalanine residue at position 234 with an alanine residue and the leucine residue at position 235 with an alanine residue (F234A/L235A).

[0332] In one embodiment, the Fc region is modified by substituting the glycine residue at position 236 with an arginine residue and the leucine residue at position 328 with an arginine residue (G236R/L328R).

[0333] In one embodiment, the Fc region is modified by substituting the aspartate residue at position 265 with an alanine residue, the asparagine residue at position 297 with an alanine residue and the proline residue at position 329 with an alanine residue (D265A/N297A/P329A).

[0334] In one embodiment, the Fc region is modified by substituting the aspartate residue at position 265 with an asparagine residue, the asparagine residue at position 297 with an aspartate residue and the proline residue at position 329 with a glycine residue (D265N/N297D/P329G).

[0335] In one embodiment, the Fc region is modified by substituting the aspartate residue at position 265 with a glutamate residue, the asparagine residue at position 297 with an glutamine residue and the proline residue at position 329 with a serine residue (D265E/N297Q/P329S).

[0336] It will be appreciated that any of the modifications listed above can be combined to decrease FcγR binding.

[0337] In one embodiment, a CD19 binding molecule comprises an Fc domain in which one or both Fc regions comprise one or more modifications that decrease Fc binding to FcγRIIIa without affecting the Fc's binding to FcγRII.

[0338] In one embodiment, the Fc region is modified by substituting the serine residue at position 239 with an alanine residue (S239A).

[0339] In one embodiment, the Fc region is modified by substituting the glutamic acid residue at position 269 with an alanine residue (E269A).

[0340] In one embodiment, the Fc region is modified by substituting the glutamic acid residue at position 293 with an alanine residue (E293A).

[0341] In one embodiment, the Fc region is modified by substituting the tyrosine residue at position 296 with a phenylalanine residue (Y296F).

[0342] In one embodiment, the Fc region is modified by substituting the valine residue at position 303 with an alanine residue (V303A).

[0343] In one embodiment, the Fc region is modified by substituting the alanine residue at position 327 with a glycine residue (A327G).

[0344] In one embodiment, the Fc region is modified by substituting the lysine residue at position 338 with an alanine residue (K338A).

[0345] In one embodiment, the Fc region is modified by substituting the aspartic acid residue at position 376 with an alanine residue (D376A).

[0346] It will be appreciated that any of the modifications listed above can be combined to decrease FcγRIIIa binding.

[0347] Fc region variants with decreased FcR binding can be referred to as “FcγR ablation variants,” “FcγR silencing variants” or “Fc knock out (FcKO or KO)” variants. For some therapeutic applications, it is desirable to reduce or remove the normal binding of an Fc domain to one or more or all of the Fcγ receptors (e.g., FcγR1, FcγRIIa, FcγRIIb, FcγRIIIa) to avoid additional mechanisms of action. That is, for example, in many embodiments, particularly in the use of MBMs that bind CD3 monovalently, it is generally desirable to ablate FcγRIIIa binding to eliminate or significantly reduce ADCC activity. In some embodiments, at least one of the Fc regions of the MBMs described herein comprises one or more Fcγ receptor ablation variants. In some embodiments, both of the Fc regions comprise one or more Fcγ receptor ablation variants. These ablation variants are depicted in Table 3, and each can be independently and optionally included or excluded, with some aspects utilizing ablation variants selected from the group consisting of G236R/L328R, E233P/L234V/L235A/G236del/S239K, E233P/L234V/L235A/G236del/S267K, E233P/L234V/L235A/G236del/S239K/A327G, E233P/L234V/L235A/G236del/S267K/A327G, E233P/L234V/L235A/G236del, D265A/N297A/P329A, D265N/N297D/P329G, and D265E/N297Q/P329S (“del” connotes a deletion, e.g., G236del refers to a deletion of the glycine at position 236). It should be noted that the ablation variants referenced herein ablate FcγR binding but generally not FcRn binding.

TABLE 3
Ablation Variants

| Variant | Variant(s), cont. |
|---|---|
| G236R | P329K |
| S239G | A330L |
| S239K | A330S/P331S |
| S239Q | I332K |
| S239R | I332R |
| V266D | V266D/A327Q |
| S267K | V266D/P329K |
| S267R | S267R/A327Q |
| H268K | S267R/P329K |
| E269R | G236R/L328R |
| 299R | E233P/L234V/L235A/G236del/S239K |
| 299K | E233P/L234V/L235A/G236del/S267K |
| K322A | E233P/L234V/L235A/G236del/S239K/A327G |
| A327G | E233P/L234V/L235A/G236del/S267K/A327G |
| A327L | E233P/L234V/L235A/G236del |
| A327N | S239K/S267K |
| A327Q | 267K/P329K |
| L328E | D265A/N297A/P329A |
| L328R | D265N/N297D/P329G |
| P329A | D265E/N297Q/P329S |
| P329H | |

[0348] In some embodiments, the MBMs of the present disclosure comprises a first Fc region and a second Fc region. In some embodiments, the first Fc region and/or the second Fc region can comprise the following mutations: E233P, L234V, L-235A, G236del, and S267K.

[0349] The Fc domain of human IgG1 has the highest binding to the Fcγ receptors, and thus ablation variants can be used when the constant domain (or Fc domain) in the backbone of the heterodimeric antibody is IgG1.

[0350] Alternatively, or in addition to ablation variants in an IgG1 background, mutations at the glycosylation position 297, e.g., substituting the asparagine residue at position 297 with an alanine residue (N297A) or a glutamine residue (N297Q), can significantly ablate binding to FcγRIIIa, for example. Human IgG2 and IgG4 have naturally reduced binding to the Fcγ receptors, and thus those backbones can be used with or without the ablation variants.

7.2.2.1.2. Fc Domains with Altered Complement Binding

[0351] The CD19 binding molecules can comprise an Fc domain in which one or both Fc regions comprises one or more modifications that alter Fc binding to complement. Altered complement binding can be increased binding or decreased binding.

[0352] In one embodiment, the Fc region comprises one or more modifications which decrease its binding to C1q. Initiation of the classical complement pathway starts with binding of hexameric C1q protein to the CH2 domain of antigen bound IgG and IgM.

[0353] In one embodiment, the CD19 binding molecule comprises an Fc domain in which one or both Fc regions comprises one or more modifications to decrease Fc binding to C1q.

[0354] In one embodiment, the Fc region is modified by substituting the leucine residue at position 234 with an alanine residue (L234A).

[0355] In one embodiment, the Fc region is modified by substituting the leucine residue at position 235 with an alanine residue (L235A).

[0356] In one embodiment, the Fc region is modified by substituting the leucine residue at position 235 with a glutamic acid residue (L235E).

[0357] In one embodiment, the Fc region is modified by substituting the glycine residue at position 237 with an alanine residue (G237A).

[0358] In one embodiment, the Fc region is modified by substituting the lysine residue at position 322 with an alanine residue (K322A).

[0359] In one embodiment, the Fc region is modified by substituting the proline residue at position 331 with an alanine residue (P331A).

[0360] In one embodiment, the Fc region is modified by substituting the proline residue at position 331 with a serine residue (P331S).

[0361] In one embodiment, a CD19 binding molecule comprises an Fc domain derived from IgG4. IgG4 has a naturally lower complement activation profile than IgG1, but also weaker binding of FcγR. Thus, in one embodiment, the CD19 binding molecule comprises an IgG4 Fc domain and also comprises one or more modifications that increase FcγR binding.

[0362] It will be appreciated that any of the modifications listed above can be combined to reduce C1q binding.

7.2.2.1.3. Fc Domains with Altered Disulfide Architecture

[0363] The CD19 binding molecule can include an Fc domain comprising one or more modifications to create and/or remove a cysteine residue. Cysteine residues have an important role in the spontaneous assembly of Fc-based multispecific binding molecules, by forming disulfide bridges between individual pairs of polypeptide monomers. Thus, by altering the number and/or position of cysteine residues, it is possible to modify the structure of the CD19 binding molecule to produce a protein with improved therapeutic properties.

[0364] A CD19 binding molecule of the present disclosure can comprise an Fc domain in which one or both Fc regions, e.g., both Fc regions, comprise a cysteine residue at position 309. In one embodiment, the cysteine residue at position 309 is created by a modification, e.g., for an Fc domain derived from IgG1, the leucine residue at position 309 is substituted with a cysteine residue (L309C), for an Fc domain derived from IgG2, the valine residue at position 309 is substituted with a cysteine residue (V309C).

[0365] In one embodiment, the Fc region is modified by substituting the valine residue at position 308 with a cysteine residue (V308C).

[0366] In one embodiment, two disulfide bonds in the hinge region are removed by mutating a core hinge sequence CPPC (SEQ ID NO: 1179) to SPPS (SEQ ID NO: 1180).

7.2.2.1.4. Fc Domains with Altered Glycosylation

[0367] In certain aspects, CD19 binding molecules with improved manufacturability are provided that comprise fewer glycosylation sites than a corresponding immunoglobulin. These proteins have less complex post translational glycosylation patterns and are thus simpler and less expensive to manufacture.

[0368] In one embodiment a glycosylation site in the CH2 domain is removed by substituting the asparagine residue at position 297 with an alanine residue (N297A) or a glutamine residue (N297Q). In addition to improved manufacturability, these aglycosyl mutants also reduce FcγR binding as described herein above.

[0369] In some embodiments, a CD19 binding molecule can be made that has an altered type of glycosylation, such as a hypofucosylated antibody having reduced amounts of fucosyl residues or an antibody having increased bisecting GlcNac structures. Such altered glycosylation patterns have been demonstrated to increase the ADCC ability of antibodies. Such carbohydrate modifications can be accomplished by, for example, expressing a CD19 binding molecule in a host cell with altered glycosylation machinery. Cells with altered glycosylation machinery have been described in the art and can be used as host cells in which to express CD19 binding molecules to thereby produce CD19 binding molecules with altered glycosylation. For example, EP 1,176,195 by Hang et al. describes a cell line with a functionally disrupted FUT8 gene, which encodes a fucosyl transferase, such that antibodies expressed in such a cell line exhibit hypofucosylation. PCT Publication WO 03/035835 by Presta describes a variant CHO cell line, Lecl3 cells, with reduced ability to attach fucose to Asn(297)-linked carbohydrates, also resulting in hypofucosylation of antibodies expressed in that host cell (see also Shields et al., 2002, J. Biol. Chem. 277:26733-26740). PCT Publication WO 99/54342 by Umana et al. describes cell lines engineered to express glycoprotein-modifying glycosyl transferases (e.g., beta(1,4)—N acetylglucosaminyltransferase III (GnTII)) such that antibodies expressed in the engineered cell lines exhibit increased bisecting GlcNac structures which results in increased ADCC activity of the antibodies (see also Umana et al., Nat. Biotech. 17:176-180, 1999).

### 7.2.2.1.5. Fc Heterodimerization

[0370] Many multispecific molecule formats entail dimerization between two Fc regions that, unlike a native immunoglobulin, are operably linked to non-identical antigen-binding domains (or portions thereof, e.g., a VH or VH—CH1 of a Fab). Inadequate heterodimerization of two Fc regions to form an Fc domain has always been an obstacle for increasing the yield of desired multispecific molecules and represents challenges for purification. A variety of approaches available in the art can be used in for enhancing dimerization of Fc regions that might be present in the CD19 binding molecules (and particularly in the MBMs of the disclosure), for example as disclosed in EP 1870459A1; U.S. Pat. Nos. 5,582,996; 5,731,168; 5,910,573; 5,932,448; 6,833,441; 7,183,076; U.S. Patent Application Publication No. 2006204493A1; and PCT Publication No. WO2009/089004A1.

[0371] The present disclosure provides CD19 binding molecules comprising Fc heterodimers, i.e., Fc domains comprising heterologous, non-identical Fc regions. Heterodimerization strategies are used to enhance dimerization of Fc regions operably linked to different ABMs (or portions thereof, e.g., a VH or VH—CH1 of a Fab) and reduce dimerization of Fc regions operably linked to the same ABM or portion thereof. Typically, each Fc region in the Fc heterodimer comprises a CH3 domain of an antibody. The CH3 domains are derived from the constant region of an antibody of any isotype, class or subclass, and in some cases, of IgG (IgG1, IgG2, IgG3 and IgG4) class, as described in the preceding section.

[0372] Typically, the MBMs comprise other antibody fragments in addition to CH3 domains, such as, CH1 domains, CH2 domains, hinge domain, VH domain(s), VL domain(s), CDR(s), and/or antigen-binding fragments described herein. In some embodiments, the two hetero-polypeptides are two heavy chains forming a bispecific or multispecific molecules. Heterodimerization of the two different heavy chains at CH3 domains give rise to the desired antibody or antibody-like molecule, while homodimerization of identical heavy chains will reduce yield of the desired antibody or molecule. In an exemplary embodiment, the two or more hetero-polypeptide chains comprise two chains comprising CH3 domains and forming the molecules of any of the multispecific molecule formats described above of the present disclosure. In an embodiment, the two hetero-polypeptide chains comprising CH3 domains comprise modifications that favor heterodimeric association of the polypeptides, relative to unmodified chains. Various examples of modification strategies are provided below in Table 4 and subsections (a) to (g) of Section 7.2.2.1.5.

TABLE 4
Fc Heterodimerization Strategies

| NO. | STRATEGY | CH3 DOMAIN 1 | CH3 DOMAIN 2 | REFERENCES |
|---|---|---|---|---|
| Fc 1 | knobs-into-holes | T366Y | Y407T | Ridgway et al., 1996, |
| | (Y-T) | | | Protein Eng 9: 617- |
| | | | | 21 |
| Fc 2 | knobs-into-holes | S354C, T366W | Y349C, T366S, | Atwell et al., 1997, J |
| | (CW-CSAV) | | L368A, Y407V | Mol Biol. 270(1): 26- |
| | | | | 35; Merchant et al., |
| | | | | 1998, Nat Biotechnol |
| | | | | 16: 677-681 |
| Fc 3 | HA-TF | S364H, F405A | Y349T, T394F | Moore et al., 2011, |
| | | | | MAbs 3(6): 546-57 |
| Fc 4 | ZW1 (VYAV- | T350V, L351Y, | T350V, T366L, | Von Kreudenstein et |
| | VLLW) | F405A, Y407V | K392L, T394W | al., 2013, MAbs |
| | | | | 5: 646-54 |
| Fc 5 | CH3 charge pairs | K392D, K409D | E356K, D399K | Gunasekaran et al., |
| | (DD-KK) | | | 2010, J Biol Chem |
| | | | | 285: 19637-46 |
| Fc 6 | IgG1 hingE, CH3 | IgG1: D221E, | IgG1: D221R, | Strop et al., 2012, J |
| | charge pairs (EEE- | P228E, L368E | P228R, K409R | Mol Biol 420: 204-19 |
| | RRR) | | | |
| Fc 7 | IgG2 hingE, CH3 | IgG2: C223E, | IgG2: C223R, | Strop et al., 2012, J |
| | charge pairs (EEE- | P228E, L368E | E225R, P228R, | Mol Biol 420: 204-19 |
| | RRRR) | | K409R | |
| Fc 8 | EW-RVT | K360E, K409W, | Q347R, D399V, | Choi et al., 2013, |
| | | | F405T | Mol Cancer Ther |
| | | | | 12: 2748-59 |
| Fc 9 | EW-RVTS-S | K360E, K409W, | Q347R, D399V, | Choi et al., 2015, |
| | | Y349C | F405T, S354C | Mol Immunol |
| | | | | 65: 377-83 |
| Fc 10 | Biclonic | 366K (+351K) | 351D or E or D at | Geuijen et al., 2014, |
| | | | 349, 368, 349, or | Journal of Clinical |
| | | | 349 + 355 | Oncology |
| | | | | 32: suppl: 560 |
| Fc 11 | DuoBody (L-R) | F405L | K409R | Labrijn et al., 2013, |
| | | | | Proc Natl Acad Sci |
| | | | | USA 110: 5145-50 |
| Fc 12 | SEEDbody | IgG/A chimera | IgG/A chimera | Davis et al., 2010, |
| | | | | Protein Eng Des Sel |
| | | | | 23: 195-202 |
| Fc 13 | BEAT | residues from | residues from | Moretti et al., 2013, |
| | | TCRα interface | TCRβ interface | BMC Proceedings |
| | | | | 7(Suppl 6): O9 |
| Fc 14 | 7.8.60 (DMA- | K360D, D399M, | E345R, Q347R, | Leaver-Fey et al., |
| | RRVV) | Y407A | T366V, K409V | Structure 24: 641-51 |
| Fc 15 | 20.8.34 (SYMV- | Y349S, K370Y, | E356G, E357D, | Leaver-Fey et al., |
| | GDQA) | T366M, K409V | S364Q, Y407A | Structure 24: 641-51 |
| Fc 16 | Skew variant | None | None | FIG. 34 of US |
| | 12757 | | | 2016/0355600 |
| Fc 17 | Skew variant | L368D, K370S | S364K | FIG. 34 of US |
| | 12758 | | | 2016/0355600 |
| Fc 18 | Skew variant | L368D, K370S | S364K, E357L | FIG. 34 of US |
| | 12759 | | | 2016/0355600 |
| Fc 19 | Skew variant | L368D, K370S | S364K, E357Q | FIG. 34 of US |
| | 12760 | | | 2016/0355600 |
| Fc 20 | Skew variant | T411E, K360E, | D401K | FIG. 34 of US |
| | 12761 | Q362E | | 2016/0355600 |
| Fc 21 | Skew variant | L368E, K370S | S364K | FIG. 34 of US |
| | 12496 | | | 2016/0355600 |
| Fc 22 | Skew variant | K370S | S364K | FIG. 34 of US |
| | 12511 | | | 2016/0355600 |
| Fc 23 | Skew variant | L368E, K370S | S364K, E357Q | FIG. 34 of US |
| | 12840 | | | 2016/0355600 |
| Fc 24 | Skew variant | K370S | S364K, E357Q | FIG. 34 of US |
| | 12841 | | | 2016/0355600 |
| Fc 25 | Skew variant | L368E, K370S | S364K | FIG. 34 of US |
| | 12894 | | | 2016/0355600 |
| Fc 26 | Skew variant | K370S | S364K | FIG. 34 of US |
| | 12895 | | | 2016/0355600 |
| Fc 27 | Skew variant | L368E, K370S | S364K, E357Q | FIG. 34 of US |
| | 12896 | | | 2016/0355600 |
| Fc 28 | Skew variant | K370S | S364K, E357Q | FIG. 34 of US |
| | 12901 | | | 2016/0355600 |
| Fc 29 | pI_ISO(−) | I199T, N203D, | | FIG. 31 of US |
| | | K274Q, R355Q, | | 2016/0355600 |
| | | N384S, K392N, | | |
| | | V397M, Q419E, | | |
| | | DEL447 | | |
| Fc 30 | pI_(−)_Isosteric_A | N208D, Q295E, | | FIG. 31 of US |
| | | N384D, Q418E, | | 2016/0355600 |
| | | N421D | | |
| Fc 31 | pI_(−)_isosteric_B | N208D, Q295E, | | FIG. 31 of US |
| | | Q418E, N421D | | 2016/0355600 |
| Fc 32 | pI_ISO(+RR) | Q196K, I199T, | | FIG. 31 of US |
| | | P217R, P228R, | | 2016/0355600 |
| | | N276K | | |
| Fc 33 | pI_ISO(+) | Q196K, I199T, | | FIG. 31 of US |
| | | N276K | | 2016/0355600 |
| Fc 34 | pI_(+) isosteric_A | E269Q, E272Q, | | FIG. 31 of US |
| | | E283Q, E357Q, | | 2016/0355600 |
| Fc 35 | pI_(+)_isosteric_B | E269Q, E272Q, | | FIG. 31 of US |
| | | E283Q | | 2016/0355600 |
| Fc 36 | pI_(+) | E269Q, E272Q | | FIG. 31 of US |
| | isosteric_E269Q, | | | 2016/0355600 |
| | E272Q | | | |
| Fc 37 | pI_(+)_isosteric_E2 | E269Q, E283Q | | FIG. 31 of US |
| | 69Q, E283Q | | | 2016/0355600 |
| Fc 38 | pI_(+) | E272Q, E283Q | | FIG. 31 of US |
| | isosteric_E2720, | | | 2016/0355600 |
| | E283Q | | | |
| Fc 39 | pI_(+)_isosteric_E2 | E269Q | | FIG. 31 of US |
| | 69Q | | | 2016/0355600 |
| Fc 40 | Heterodimerization | F405A | T394F | FIG. 30A of US |
| | | | | 2016/0355600 |
| Fc 41 | Heterodimerization | S364D | Y349K | FIG. 30A of US |
| | | | | 2016/0355600 |
| Fc 42 | Heterodimerization | S364E | L368K | FIG. 30A of US |
| | | | | 2016/0355600 |
| Fc 43 | Heterodimerization | S364E | Y349K | FIG. 30A of US |
| | | | | 2016/0355600 |
| Fc 44 | Heterodimerization | S364F | K370G | FIG. 30A of US |
| | | | | 2016/0355600 |
| Fc 45 | Heterodimerization | S364H | Y349K | FIG. 30A of US |
| | | | | 2016/0355600 |
| Fc 46 | Heterodimerization | S364H | Y349T | FIG. 30A of US |
| | | | | 2016/0355600 |
| Fc 47 | Heterodimerization | S364Y | K370G | FIG. 30A of US |
| | | | | 2016/0355600 |
| Fc 48 | Heterodimerization | T411K | K370E | FIG. 30A of US |
| | | | | 2016/0355600 |
| Fc 49 | Heterodimerization | V397S, F405A | T394F | FIG. 30A of US |
| | | | | 2016/0355600 |
| Fc 50 | Heterodimerization | K370R, T411K | K370E, T411E | FIG. 30A of US |
| | | | | 2016/0355600 |
| Fc 51 | Heterodimerization | L351E, S364D | Y349K, L351K | FIG. 30A of US |
| | | | | 2016/0355600 |
| Fc 52 | Heterodimerization | L351E, S364E | Y349K, L351K | FIG. 30A of US |
| | | | | 2016/0355600 |
| Fc 53 | Heterodimerization | L351E, T366D | L351K, T366K | FIG. 30A of US |
| | | | | 2016/0355600 |
| Fc 54 | Heterodimerization | P395T, V397S, | T394F | FIG. 30A of US |
| | | F405A | | 2016/0355600 |
| Fc 55 | Heterodimerization | S364D, K370G | S364Y, K370R | FIG. 30A of US |
| | | | | 2016/0355600 |
| Fc 56 | Heterodimerization | S364D, T394F | Y349K, F405A | FIG. 30A of US |
| | | | | 2016/0355600 |
| Fc 57 | Heterodimerization | S364E, F405A | Y349K, T394F | FIG. 30A of US |
| | | | | 2016/0355600 |
| Fc 58 | Heterodimerization | S364E, F405S | Y349K, T394Y | FIG. 30A of US |
| | | | | 2016/0355600 |
| Fc 59 | Heterodimerization | S364E, T411E | Y349K, D401K | FIG. 30A of US |
| | | | | 2016/0355600 |
| Fc 60 | Heterodimerization | S364H, D401K | Y349T, T411E | FIG. 30A of US |
| | | | | 2016/0355600 |
| Fc 61 | Heterodimerization | S364H, F405A | Y349T, T394F | FIG. 30A of US |
| | | | | 2016/0355600 |
| Fc 62 | Heterodimerization | S364H, T394F | Y349T, F405A | FIG. 30A of US |
| | | | | 2016/0355600 |
| Fc 63 | Heterodimerization | Y349C, S364E | Y349K, S354C | FIG. 30A of US |
| | | | | 2016/0355600 |
| Fc 64 | Heterodimerization | L351E, S364D, | Y349K, L351K, | FIG. 30A of US |
| | | F405A | T394F | 2016/0355600 |
| Fc 65 | Heterodimerization | L351K, S364H, | Y349T, L351E, | FIG. 30A of US |
| | | D401K | T411E | 2016/0355600 |
| Fc 66 | Heterodimerization | S364E, T411E, | Y349K, T394F, | FIG. 30A of US |
| | | F405A | D401K | 2016/0355600 |
| Fc 67 | Heterodimerization | S364H, D401K, | Y349T, T394F, | FIG. 30A of US |
| | | F405A | T411E | 2016/0355600 |
| Fc 68 | Heterodimerization | S364H, F405A, | Y349T, T394F, | FIG. 30A of US |
| | | T411E | D401K | 2016/0355600 |
| Fc 69 | Heterodimerization | T411E, K360E, | D401K | FIG. 30C of US |
| | | N390D | | 2016/0355600 |
| Fc 70 | Heterodimerization | T411E, Q362E, | D401K | FIG. 30C of US |
| | | N390D | | 2016/0355600 |
| Fc 71 | Heterodimerization | T411E, Q347R | D401K, K360D | FIG. 30C of US |
| | | | | 2016/0355600 |
| Fc 72 | Heterodimerization | T411E, Q347R | D401K, K360E | FIG. 30C of US |
| | | | | 2016/0355600 |
| Fc 73 | Heterodimerization | T411E, K360 | D401K, Q347K | FIG. 30C of US |
| | | | | 2016/0355600 |
| Fc 74 | Heterodimerization | T411E, K360D | D401K, Q347R | FIG. 30C of US |
| | | | | 2016/0355600 |
| Fc 75 | Heterodimerization | T411E, K360E | D401K, Q347K | FIG. 30C of US |
| | | | | 2016/0355600 |
| Fc 76 | Heterodimerization | T411E, K360E | D401K, Q347R | FIG. 30C of US |
| | | | | 2016/0355600 |
| Fc 77 | Heterodimerization | T411E, S364K | D401K, K370S | FIG. 30C of US |
| | | | | 2016/0355600 |
| Fc 78 | Heterodimerization | T411E, K370S | D401K, S364K | FIG. 30C of US |
| | | | | 2016/0355600 |
| Fc 79 | Heterodimerization | Q347E | E357Q | FIG. 30C of US |
| | | | | 2016/0355600 |
| Fc 80 | Heterodimerization | Q347E | E357Q, Q362K | FIG. 30C of US |
| | | | | 2016/0355600 |
| Fc 81 | Heterodimerization | K360D, Q362E | Q347R | FIG. 30C of US |
| | | | | 2016/0355600 |
| Fc 82 | Heterodimerization | K360D, Q362E | D401K | FIG. 30C of US |
| | | | | 2016/0355600 |
| Fc 83 | Heterodimerization | K360D, Q362E | Q347R, D401K | FIG. 30C of US |
| | | | | 2016/0355600 |
| Fc 84 | Heterodimerization | K360E, Q362E | Q347R | FIG. 30C of US |
| | | | | 2016/0355600 |
| Fc 85 | Heterodimerization | K360E, Q362E | D401K | FIG. 30C of US |
| | | | | 2016/0355600 |
| Fc 86 | Heterodimerization | K360E, Q362E | Q347R, D401K | FIG. 30C of US |
| | | | | 2016/0355600 |
| Fc 87 | Heterodimerization | Q362E, N390D | D401K | FIG. 30C of US |
| | | | | 2016/0355600 |
| Fc 88 | Heterodimerization | Q347E, K360D | D401N | FIG. 30C of US |
| | | | | 2016/0355600 |
| Fc 89 | Heterodimerization | K360D | Q347R, N390K | FIG. 30C of US |
| | | | | 2016/0355600 |
| Fc 90 | Heterodimerization | K360D | N390K, D401N | FIG. 30C of US |
| | | | | 2016/0355600 |
| Fc 91 | Heterodimerization | K360E | Y349H | FIG. 30C of US |
| | | | | 2016/0355600 |
| Fc 92 | Heterodimerization | K370S, Q347E | S364K | FIG. 30C of US |
| | | | | 2016/0355600 |
| Fc 93 | Heterodimerization | K370S, E357L | S364K | FIG. 30C of US |
| | | | | 2016/0355600 |
| Fc 94 | Heterodimerization | K370S, E357Q | S364K | FIG. 30C of US |
| | | | | 2016/0355600 |
| Fc 95 | Heterodimerization | K370S, Q347E, | S364K | FIG. 30C of US |
| | | E357L | | 2016/0355600 |
| Fc 96 | Heterodimerization | K370S, Q347E, | S364K | FIG. 30C of US |
| | | E357Q | | 2016/0355600 |
| Fc 97 | Heterodimerization | L368D, K370S, | S364K | FIG. 30D of US |
| | | Q347E | | 2016/0355600 |
| Fc 98 | Heterodimerization | L368D, K370S, | S364K | FIG. 30D of US |
| | | E357L | | 2016/0355600 |
| Fc 99 | Heterodimerization | L368D, K370S, | S364K | FIG. 30D of US |
| | | E357Q | | 2016/0355600 |
| Fc 100 | Heterodimerization | L368D, K370S, | S364K | FIG. 30D of US |
| | | Q347E, E357L | | 2016/0355600 |
| Fc 101 | Heterodimerization | L368D, K370S, | S364K | FIG. 30D of US |
| | | Q347E, E357Q | | 2016/0355600 |
| Fc 102 | Heterodimerization | L368E, K370S, | S364K | FIG. 30D of US |
| | | Q347E | | 2016/0355600 |
| Fc 103 | Heterodimerization | L368E, K370S, | S364K | FIG. 30D of US |
| | | E357L | | 2016/0355600 |
| Fc 104 | Heterodimerization | L368E, K370S, | S364K | FIG. 30D of US |
| | | E357Q | | 2016/0355600 |
| Fc 105 | Heterodimerization | L368E, K370S, | S364K | FIG. 30D of US |
| | | Q347E, E357L | | 2016/0355600 |
| Fc 106 | Heterodimerization | L368E, K370S, | S364K | FIG. 30D of US |
| | | Q347E, E357Q | | 2016/0355600 |
| Fc 107 | Heterodimerization | L368D, K370T, | S364K | FIG. 30D of US |
| | | Q347E | | 2016/0355600 |
| Fc 108 | Heterodimerization | L368D, K370T, | S364K | FIG. 30D of US |
| | | E357L | | 2016/0355600 |
| Fc 109 | Heterodimerization | L368D, K370T, | S364K | FIG. 30D of US |
| | | E357Q | | 2016/0355600 |
| Fc 110 | Heterodimerization | L368D, K370T, | S364K | FIG. 30D of US |
| | | Q347E, E357L | | 2016/0355600 |
| Fc 111 | Heterodimerization | L368D, K370T, | S364K | FIG. 30D of US |
| | | Q347E, E357Q | | 2016/0355600 |
| Fc 112 | Heterodimerization | L368E, K370T, | S364K | FIG. 30D of US |
| | | Q347E | | 2016/0355600 |
| Fc 113 | Heterodimerization | L368E, K370T, | S364K | FIG. 30D of US |
| | | E357L | | 2016/0355600 |
| Fc 114 | Heterodimerization | L368E, K370T, | S364K | FIG. 30D of US |
| | | E357Q | | 2016/0355600 |
| Fc 115 | Heterodimerization | L368E, K370T, | S364K | FIG. 30D of US |
| | | Q347E, E357L | | 2016/0355600 |
| Fc 116 | Heterodimerization | L368E, K370T, | S364K | FIG. 30D of US |
| | | Q347E, E357Q | | 2016/0355600 |
| Fc 117 | Heterodimerization | T411E, Q362E | D401K, T411K | FIG. 30D of US |
| | | | | 2016/0355600 |
| Fc 118 | Heterodimerization | T411E, N390D | D401K, T411K | FIG. 30D of US |
| | | | | 2016/0355600 |
| Fc 119 | Heterodimerization | T411E, Q362E | D401R, T411R | FIG. 30D of US |
| | | | | 2016/0355600 |
| Fc 120 | Heterodimerization | T411E, N390D | D401R, T411R | FIG. 30D of US |
| | | | | 2016/0355600 |
| Fc 121 | Heterodimerization | Y407T | T366Y | FIG. 30D of US |
| | | | | 2016/0355600 |
| Fc 122 | Heterodimerization | F405A | T394W | FIG. 30D of US |
| | | | | 2016/0355600 |
| Fc 123 | Heterodimerization | T366Y, F405A | T394W, Y407T | FIG. 30D of US |
| | | | | 2016/0355600 |
| Fc 124 | Heterodimerization | T366S, L368A, | T366W | FIG. 30D of US |
| | | Y407V | | 2016/0355600 |
| Fc 125 | Heterodimerization | T366S, L368A, | T366W, S354C | FIG. 30D of US |
| | | Y407V, Y349C | | 2016/0355600 |
| Fc 126 | Heterodimerization | K392D, K409D | E356K, D399K | FIG. 30E of US |
| | | | | 2016/0355600 |
| Fc 127 | Heterodimerization | K370D, K392D, | E356K, E357K, | FIG. 30E of US |
| | | K409D | D399K | 2016/0355600 |
| Fc 128 | Heterodimerization | I199T, N203D, | Q196K, L99T, | FIG. 30E of US |
| | | K247Q, R355Q, | P217R, P228R, | 2016/0355600 |
| | | N384S, K392N, | N276K | |
| | | V397M, Q419E, | | |
| | | K447 | | |
| Fc 129 | Heterodimerization | I199T, N203D, | Q196K, L99T, | FIG. 30E of US |
| | | K247Q, R355Q, | N276K | 2016/0355600 |
| | | N384S, K392N, | | |
| | | V397M, Q419E, | | |
| | | K447 | | |
| Fc 130 | Heterodimerization | N384S, K392N, | N276K | FIG. 30E of US |
| | | V397M, Q419E | | 2016/0355600 |
| Fc 131 | Heterodimerization | D221E, P228E, | D221R, P228R, | FIG. 30E of US |
| | | L368E | K409R | 2016/0355600 |
| Fc 132 | Heterodimerization | C220E, P228E, | C220R, E224R, | FIG. 30E of US |
| | | L368E | P228R, K409R | 2016/0355600 |
| Fc 133 | Heterodimerization | F405L | K409R | FIG. 30E of US |
| | | | | 2016/0355600 |
| Fc 134 | Heterodimerization | T366I, K392M, | F405A, Y407V | FIG. 30E of US |
| | | T394W | | 2016/0355600 |
| Fc 135 | Heterodimerization | T366V, K409F | L351Y, Y407A | FIG. 30E of US |
| | | | | 2016/0355600 |
| Fc 136 | Heterodimerization | T366A, K392E, | D399R, S400R, | FIG. 30E of US |
| | | K409F, T411E | Y407A | 2016/0355600 |
| Fc 137 | Heterodimerization | L351K | L351E | FIG. 30E of US |
| | | | | 2016/0355600 |
| Fc 138 | Heterodimerization | I199T, N203D, | Q196K, L199T, | FIG. 30E of US |
| | | K247Q, R355Q, | P217R, P228R, | 2016/0355600 |
| | | Q419E, K447 | N276K | |
| Fc 139 | Heterodimerization | I199T, N203D, | Q196K, I199T, | FIG. 30E of US |
| | | K247Q, R355Q, | N276K | 2016/0355600 |
| | | Q419E, K447 | | |
| Fc 140 | Heterodimerization | I199T, N203D, | | FIG. 30E of US |
| | | K274Q, R355Q, | | 2016/0355600 |
| | | N384S, K392N, | | |
| | | V397M, Q419E | | |
| | | DEL447 | | |
| Fc 141 | Heterodimerization | N208D, Q295E | | FIG. 30E of US |
| | | N384D, Q418E | | 2016/0355600 |
| | | N421D | | |
| Fc 142 | Heterodimerization | N208D, Q295E | | FIG. 30E of US |
| | | Q418E, N421D | | 2016/0355600 |
| Fc 143 | Heterodimerization | Q196K, I199T | | FIG. 30E of US |
| | | P217R, P228R | | 2016/0355600 |
| | | N276K | | |
| Fc 144 | Heterodimerization | Q196K, I199T | | FIG. 30E of US |
| | | N276K | | 2016/0355600 |
| Fc 145 | Heterodimerization | E269Q, E272Q | | FIG. 30E of US |
| | | E283Q, E357Q | | 2016/0355600 |
| Fc 146 | Heterodimerization | E269Q, E272Q | | FIG. 30E of US |
| | | E283Q, | | 2016/0355600 |
| Fc 147 | Heterodimerization | E269Q, E272Q | | FIG. 30E of US |
| | | | | 2016/0355600 |
| Fc 148 | Heterodimerization | E269Q, E283Q | | FIG. 30E of US |
| | | | | 2016/0355600 |
| Fc 149 | Heterodimerization | E272Q, E283Q | | FIG. 30E of US |
| | | | | 2016/0355600 |
| Fc 150 | Heterodimerization | E269Q | | FIG. 30E of US |
| | | | | 2016/0355600 |

[0373] Exemplary pairs of heterologous, non-identical Fc sequences that can pair to form a Fc heterodimer, and which can be included in CD19 binding molecules of the disclosure, include (i) SEQ ID NO:252 and SEQ ID NO:253, and (ii) SEQ ID NO:252 and SEQ ID NO:254.

(SEQ ID NO: 252)
DKTHTCPPCPAPELLGGPSVFLFPPKPKDTLMISRTPEVTCVVVDVSHE
DPEVKFNWYVDGVEVHNAKTKPREEQYNSTYRVVSVLTVLHQDWLNGKE
YKCKVSNKALPAPIEKTISKAKGQPREPQVCTLPPSREEMTKNQVSLSC
AVKGFYPSDIAVEWESNGQPENNYKTTPPVLDSDGSFFLVSKLTVDKSR
WQQGNVFSCSVMHEALHNHYTQKSLSLSPGK
(SEQ ID NO: 253)
DKTHTCPPCPAPELLGGPSVFLFPPKPKDTLMISRTPEVTCVVVDVSHE
DPEVKFNWYVDGVEVHNAKTKPREEQYNSTYRVVSVLTVLHQDWLNGKE
YKCKVSNKALPAPIEKTISKAKGQPREPQVYTLPPCREEMTKNQVSLWC
LVKGFYPSDIAVEWESNGQPENNYKTTPPVLDSDGSFFLYSKLTVDKSR
WQQGNVFSCSVMHEALHNHYTQKSLSLSPGK
(SEQ ID NO: 254)
DKTHTCPPCPAPELLGGPSVFLFPPKPKDTLMISRTPEVTCVVVDVSHE
DPEVKFNWYVDGVEVHNAKTKPREEQYNSTYRVVSVLTVLHQDWLNGKE
YKCKVSNKALPAPIEKTISKAKGQPREPQVYTLPPCREEMTKNQVSLWC
LVKGFYPSDIAVEWESNGQPENNYKTTPPVLDSDGSFFLYSKLTVDKSR
WQQGNVFSCSVMHEALHNRYTQKSLSLSPGK

[0374] An Fc region having an amino acid sequence of one of SEQ ID NOS: 252-254 can be modified to include one or more of the substitutions described in Section 7.2.2.1 (including its subparts), for example to include the substitution(s) corresponding to an ablation variant set forth in Table 3. In some embodiments, a CD19 binding molecule comprises an Fc region having an amino acid sequence of one of SEQ ID NOs:252-254 with a mutation at 1, 2, 3, 4, 5, 6, or more than 6 of positions 233, 234, 235, 236, 237, 239, 265, 266, 267, 268, 269, 297, 299, 322, 327, 328, 329, 330, 331 and 332 (EU numbering), for example mutation(s) described in Section 7.2.2.1 (including its subparts). For example, a CD19 binding molecule can comprise an Fc region having an amino acid sequence of SEQ ID NO:252 with a mutation at 1, 2, 3, 4, 5, 6, or more than 6 of positions 233, 234, 235, 236, 237, 239, 265, 266, 267, 268, 269, 297, 299, 322, 327, 328, 329, 330, 331 and 332 and/or an Fc region having an amino acid sequence of SEQ ID NO:253 with a mutation at 1, 2, 3, 4, 5, 6, or more than 6 of positions 233, 234, 235, 236, 237, 239, 265, 266, 267, 268, 269, 297, 299, 322, 327, 328, 329, 330, 331 and 332 and/or an Fc region having an amino acid sequence of SEQ ID NO:254 with a mutation at 1, 2, 3, 4, 5, 6, or more than 6 of positions 233, 234, 235, 236, 237, 239, 265, 266, 267, 268, 269, 297, 299, 322, 327, 328, 329, 330, 331 and 332.

### (a) Steric Variants

[0375] CD19 binding molecules can comprise one or more, e.g., a plurality, of modifications to one or more of the constant domains of an Fc domain, e.g., to the CH3 domains. In one example, a CD19 binding molecule of the present disclosure comprises two polypeptides that each comprise a heavy chain constant domain of an antibody, e.g., a CH2 or CH3 domain. In an example, the two heavy chain constant domains, e.g., the CH2 or CH3 domains of the CD19 binding molecule comprise one or more modifications that allow for a heterodimeric association between the two chains. In one aspect, the one or more modifications are disposed on CH2 domains of the two heavy chains. In one aspect, the one or more modifications are disposed on CH3 domains of at least two polypeptides of the CD19 binding molecule.

[0376] One mechanism for Fc heterodimerization is generally referred to as “knobs and holes” or “knobs-into-holes”. These terms refer to amino acid mutations that create steric influences to favor formation of Fc heterodimers over Fc homodimers, as described in, e.g., Ridgway et al., 1996, Protein Engineering 9(7):617; Atwell et al., 1997, J. Mol. Biol. 270:26; U.S. Pat. No. 8,216,805. Knob-in-hole mutations can be combined with other strategies to improve heterodimerization.

[0377] In one aspect, the one or more modifications to a first polypeptide of the CD19 binding molecule comprising a heavy chain constant domain can create a “knob” and the one or more modifications to a second polypeptide of the CD19 binding molecule creates a “hole,” such that heterodimerization of the polypeptide of the CD19 binding molecule comprising a heavy chain constant domain causes the “knob” to interface (e.g., interact, e.g., a CH2 domain of a first polypeptide interacting with a CH2 domain of a second polypeptide, or a CH3 domain of a first polypeptide interacting with a CH3 domain of a second polypeptide) with the “hole.” The knob projects from the interface of a first polypeptide of the CD19 binding molecule comprising a heavy chain constant domain and is therefore positionable in a compensatory “hole” in the interface with a second polypeptide of the CD19 binding molecule comprising a heavy chain constant domain so as to stabilize the heteromultimer, and thereby favor heteromultimer formation over homomultimer formation, for example. The knob can exist in the original interface or can be introduced synthetically (e.g. by altering nucleic acid encoding the interface). The import residues for the formation of a knob are generally naturally occurring amino acid residues and can be selected from arginine (R), phenylalanine (F), tyrosine (Y) and tryptophan (W). In some cases, tryptophan and tyrosine are selected. In an embodiment, the original residue for the formation of the protuberance has a small side chain volume, such as alanine, asparagine, aspartic acid, glycine, serine, threonine or valine.

[0378] A “hole” comprises at least one amino acid side chain which is recessed from the interface of a second polypeptide of the CD19 binding molecule comprising a heavy chain constant domain and therefore accommodates a corresponding knob on the adjacent interfacing surface of a first polypeptide of the CD19 binding molecule comprising a heavy chain constant domain. The hole can exist in the original interface or can be introduced synthetically (e.g. by altering nucleic acid encoding the interface). The import residues for the formation of a hole are usually naturally occurring amino acid residues and are in some embodiments selected from alanine (A), serine (S), threonine (T) and valine (V). In one embodiment, the amino acid residue is serine, alanine or threonine. In another embodiment, the original residue for the formation of the hole has a large side chain volume, such as tyrosine, arginine, phenylalanine or tryptophan.

[0379] In an embodiment, a first CH3 domain is modified at residue 366, 405 or 407 to create either a “knob” or a hole” (as described above), and the second CH3 domain that heterodimerizes with the first CH3 domain is modified at: residue 407 if residue 366 is modified in the first CH3 domain, residue 394 if residue 405 is modified in the first CH3 domain, or residue 366 if residue 407 is modified in the first CH3 domain to create a “hole” or “knob” complementary to the “knob” or “hole” of the first CH3 domain.

[0380] In another embodiment, a first CH3 domain is modified at residue 366, and the second CH3 domain that heterodimerizes with the first CH3 domain is modified at residues 366, 368 and/or 407, to create a “hole” or “knob” complementary to the “knob” or “hole” of the first CH3 domain. In one embodiment, the modification to the first CH3 domain introduces a tyrosine (Y) residue at position 366. In an embodiment, the modification to the first CH3 is T366Y. In one embodiment, the modification to the first CH3 domain introduces a tryptophan (W) residue at position 366. In an embodiment, the modification to the first CH3 is T366W. In some embodiments, the modification to the second CH3 domain that heterodimerizes with the first CH3 domain modified at position 366 (e.g., has a tyrosine (Y) or tryptophan (W) introduced at position 366, e.g., comprises the modification T366Y or T366W), comprises a modification at position 366, a modification at position 368 and a modification at position 407. In some embodiments, the modification at position 366 introduces a serine (S) residue, the modification at position 368 introduces an alanine (A), and the modification at position 407 introduces a valine (V). In some embodiments, the modifications comprise T366S, L368A and Y407V. In one embodiment, the first CH3 domain of the multispecific molecule comprises the modification T366Y, and the second CH3 domain that heterodimerizes with the first CH3 domain comprises the modifications T366S, L368A and Y407V, or vice versa. In one embodiment, the first CH3 domain of the multispecific molecule comprises the modification T366W, and the second CH3 domain that heterodimerizes with the first CH3 domain comprises the modifications T366S, L368A and Y407V, or vice versa.

[0381] Additional steric or “skew” (e.g., knob in hole) modifications are described in PCT publication no. WO2014/145806 (for example, FIG. 3, FIG. 4 and FIG. 12 of WO2014/145806), PCT publication no. WO2014/110601, and PCT publication no. WO 2016/086186, WO 2016/086189, WO 2016/086196 and WO 2016/182751. An example of a KIH variant comprises a first constant chain comprising a L368D and a K370S modification, paired with a second constant chain comprising a S364K and E357Q modification.

[0382] Additional knob in hole modification pairs suitable for use in any of the CD19 binding molecules of the present disclosure are further described in, for example, WO1996/027011, and Merchant et al., 1998, Nat. Biotechnol., 16:677-681.

[0383] In further embodiments, the CH3 domains can be additionally modified to introduce a pair of cysteine residues. Without being bound by theory, it is believed that the introduction of a pair of cysteine residues capable of forming a disulfide bond provide stability to heterodimerized CD19 binding molecules, e.g., MBMs, comprising paired CH3 domains. In some embodiments, the first CH3 domain comprises a cysteine at position 354, and the second CH3 domain that heterodimerizes with the first CH3 domain comprises a cysteine at position 349. In some embodiments, the first CH3 domain comprises a cysteine at position 354 (e.g., comprises the modification S354C) and a tyrosine (Y) at position 366 (e.g., comprises the modification T366Y), and the second CH3 domain that heterodimerizes with the first CH3 domain comprises a cysteine at position 349 (e.g., comprises the modification Y349C), a serine at position 366 (e.g., comprises the modification T366S), an alanine at position 368 (e.g., comprises the modification L368A), and a valine at position 407 (e.g., comprises the modification Y407V). In some embodiments, the first CH3 domain comprises a cysteine at position 354 (e.g., comprises the modification S354C) and a tryptophan (W) at position 366 (e.g., comprises the modification T366WV), and the second CH3 domain that heterodimerizes with the first CH3 domain comprises a cysteine at position 349 (e.g., comprises the modification Y349C), a serine at position 366 (e.g., comprises the modification T366S), an alanine at position 368 (e.g., comprises the modification L368A), and a valine at position 407 (e.g., comprises the modification Y407V).

[0384] An additional mechanism that finds use in the generation of heterodimers is sometimes referred to as “electrostatic steering” as described in Gunasekaran et al., 2010, J. Biol. Chem. 285(25):19637. This is sometimes referred to herein as “charge pairs”. In this embodiment, electrostatics are used to skew the formation towards heterodimerization. As a skilled artisan will appreciate, these can also have an effect on pl, and thus on purification, and thus could in some cases also be considered pl variants. However, as these were generated to force heterodimerization and were not used as purification tools, they are classified as “steric variants”. These include, but are not limited to, D221 E/P228E/L368E paired with D221R/P228R/K409R and C220E/P228E/368E paired with C220R/E224R/P228R/K409R.

[0385] Additional variants that can be combined with other variants, optionally and independently in any amount, such as pl variants outlined herein or other steric variants that are shown in FIG. 37 of US 2012/0149876.

[0386] In some embodiments, the steric variants outlined herein can be optionally and independently incorporated with any pl variant (or other variants such as Fc variants, FcRn variants) into one or both Fc regions, and can be independently and optionally included or excluded from the CD19 binding molecules of the disclosure.

[0387] A list of suitable skew variants is found in Table 5 showing some pairs of particular utility in many embodiments. Of particular use in many embodiments are the pairs of sets including, but not limited to, S364K/E357Q:L368D/K370S; L368D/K370S:S364K; L368E/K370S: S364K; T411T/E360E/Q362E:D401K; L368D/K370S:S364K/E357L; and K370S:S364K/E357Q. In terms of nomenclature, the pair “S364K/E357Q:L368D/K370S” means that one of the Fc regions has the double variant set S364K/E357Q and the other has the double variant set L368D/K370S.

TABLE 5
Exemplary skew variants

| Fc region 1 | Fc region 2 |
|---|---|
| F405A | T394F |
| S364D | Y349K |
| S364E | L368K |
| S364E | Y349K |
| S364F | K370G |
| S364H | Y349K |
| S364H | Y349T |
| S364Y | K370G |
| T411K | K370E |
| V397S/F405A | T394F |
| K370R/T411K | K370E/T411E |
| L351E/S364D | Y349K/L351K |
| L351E/S364E | Y349K/L351K |
| L351E/T366D | L351K/T366K |
| P395T/V397S/F405A | T394F |
| S364D/K370G | S364Y/K370R |
| S364D/T394F | Y349K/F405A |
| S364E/F405A | Y349K/T394F |
| S364E/F405S | Y349K/T394Y |
| S364E/T411E | Y349K/D401K |
| S364H/D401K | Y349T/T411E |
| S364H/F405A | Y349T/T394F |
| S364H/T394F | Y349T/F405A |
| Y349C/S364E | Y349K/S354C |
| L351E/S364D/F405A | Y349K/L351K/T394F |
| L351K/S364H/D401K | Y349T/L351E/T411E |
| S364E/T411E/F405A | Y349K/T394F/D401K |
| S364H/D401K/F405A | Y349T/T394F/T411E |
| S364H/F405A/T411E | Y349T/T394F/D401K |
| K370E/T411D | T411K |
| L368E/K409E | L368K |
| Y349T/T394F/S354C | S364H/F405A/Y349C |
| T411E | D401K |
| T411E | D401R/T411R |
| Q347E/K360E | Q347R |
| L368E | S364K |
| L368E/K370S | S364K |
| L368E/K370T | S364K |
| L368E/D401R | S364K |
| L368E/D401N | S364K |
| L368E | E357S/S364K |
| L368E | S364K/K409E |
| L368E | S364K/K409V |
| L368D | S364K |
| L368D/K370S | S364K |
| L368D/K370S | S364K/E357L |
| L368D/K370S | S364K/E357Q |
| T411E/K360E/Q362E | D401K |
| K370S | S364K |
| L368E/K370S | S364K/E357Q |
| K370S | S364K/E357Q |
| T411E/K360D | D401K |
| T411E/K360E | D401K |
| T411E/Q362E | D401K |
| T411E/N390D | D401K |
| T411E | D401K/Q347K |
| T411E | D401K/Q347R |
| T411E/K360D/Q362E | D401K |
| K392D/K409D | E356K/D399K |
| K370D/K392D/K409D | E356K/E357K/D399K |
| I199T/N203D/K247Q/R355Q/N384S/ | Q196K/I199T/P217R/ |
| K392N/V397M/Q419E/K447_{—} | P228R/N276K |
| I199T/N203D/K247Q/R355Q/N384S/ | Q196K/I199T/N276K |
| K392N/V397M/Q419E/K447_{—} | |
| N384S/K392N/V397M/Q419E | N276K |
| D221E/P228E/L368E | D221R/P228R/K409R |
| C220E/P228E/L368E | C220R/E224R/P228R/ |
| | K409R |
| F405L | K409R |
| T366I/K392M/T394W | F405A/Y407V |
| T366V/K409F | L351Y/Y407A |
| T366A/K392E/K409F/T411E | D399R/S400R/Y407A |
| L351K | L351E |
| I199T/N203D/K247Q/R355Q/Q419E/K447_{—} | Q196K/I199T/P217R/ |
| | P228R/N276K |
| I199T/N203D/K247Q/R355Q/Q419E/K447_{—} | Q196K/I199T/N276K |
| I199T N203D K274Q R355Q N384S K392N | |
| V397M Q419E DEL447 | |
| N208D Q295E N384D Q418E N421D | |
| N208D Q295E Q418E N421D | |
| Q196K I199T P217R P228R N276K | |
| Q196K I199T N276K | |
| E269Q E272Q E283Q E357Q | |
| E269Q E272Q E283Q | |
| E269Q E272Q | |
| E269Q E283Q | |
| E272Q E283Q | |
| E269Q | |
| T411E/K360E/N390D | D401K |
| T411E/Q362E/N390D | D401K |
| T411E/Q347R | D401K/K360D |
| T411E/Q347R | D401K/K360E |
| T411E/K360 | D401K/Q347K |
| T411E/K360D | D401K/Q347R |
| T411E/K360E | D401K/Q347K |
| T411E/K360E | D401K/Q347R |
| T411E/S364K | D401K/K370S |
| T411E/K370S | D401K/S364K |
| Q347E | E357Q |
| Q347E | E357Q/Q362K |
| K360D/Q362E | Q347R |
| K360D/Q362E | D401K |
| K360D/Q362E | Q347R/D401K |
| K360E/Q362E | Q347R |
| K360E/Q362E | D401K |
| K360E/Q362E | Q347R/D401K |
| Q362E/N390D | D401K |
| Q347E/K360D | D401N |
| K360D | Q347R/N390K |
| K360D | N390K/D401N |
| K360E | Y349H |
| K370S/Q347E | S364K |
| K370S/E357L | S364K |
| K370S/E357Q | S364K |
| K370S/Q347E/E357L | S364K |
| K370S/Q347E/E357Q | S364K |
| L368D/K370S/Q347E | S364K |
| L368D/K370S/E357L | S364K |
| L368D/K370S/E357Q | S364K |
| L368D/K370S/Q347E/E357L | S364K |
| L368D/K370S/Q347E/E357Q | S364K |
| L368E/K370S/Q347E | S364K |
| L368E/K370S/E357L | S364K |
| L368E/K370S/E357Q | S364K |
| L368E/K370S/Q347E/E357L | S364K |
| L368E/K370S/Q347E/E357Q | S364K |
| L368D/K370T/Q347E | S364K |
| L368D/K370T/E357L | S364K |
| L368D/K370T/E357Q | S364K |
| L368D/K370T/Q347E/E357L | S364K |
| L368D/K370T/Q347E/E357Q | S364K |
| L368E/K370T/Q347E | S364K |
| L368E/K370T/E357L | S364K |
| L368E/K370T/E357Q | S364K |
| L368E/K370T/Q347E/E357L | S364K |
| L368E/K370T/Q347E/E357Q | S364K |
| T411E/Q362E | D401K/T411K |
| T411E/N390D | D401K/T411K |
| T411E/Q362E | D401R/T411R |
| T411E/N390D | D401R/T411R |
| Y407T | T366Y |
| F405A | T394W |
| T366Y/F405A | T394W/Y407T |
| Y407A | T366W |
| T366S/L368A/Y407V | T366W |
| T366S/L368A/Y407V/Y349C | T366W/S354C |
| K392D/K409D | E356K/D399K |
| K370D/K392D/K409D | E356K/E357K/D399K |
| I199T/N203D/K247Q/R355Q/N384S/ | Q196K/I199T/P217R/ |
| K392N/V397M/Q419E/K447_{—} | P228R/N276K |
| I199T/N203D/K247Q/R355Q/N384S/ | Q196K/I199T/N276K |
| K392N/V397M/Q419E/K447_{—} | |
| N384S/K392N/V397M/Q419E | N276K |
| D221E/P228E/L368E | D221R/P228R/K409R |
| C220E/P228E/L368E | C220R/E224R/P228R/ |
| | K409R |
| F405L | K409R |
| T366I/K392M/T394W | F405A/Y407V |
| T366V/K409F | L351Y/Y407A |
| T366A/K392E/K409F/T411E | D399R/S400R/Y407A |
| L351K | L351E |
| I199T/N203D/K247Q/R355Q/Q419E/K447_{—} | Q196K/I199T/P217R/ |
| | P228R/N276K |
| I199T/N203D/K247Q/R355Q/Q419E/K447_{—} | Q196K/I199T/N276K |
| I199T N203D K274Q R355Q N384S K392N | |
| V397M Q419E DEL447 | |
| N208D Q295E N384D Q418E N421D | |
| Q295E N384D Q418E N421D | |
| N208D Q295E Q418E N421D | |
| Q295E Q418E N421D | |
| Q196K I199T P217R P228R N276K | |
| Q196K I199T N276K | |
| E269Q E272Q E283Q E357Q | |
| E269Q E272Q E283Q | |
| E269Q E272Q | |
| E269Q E283Q | |
| E272Q E283Q | |
| E269Q | |

[0388] In some embodiments, a CD19 binding molecule comprises a first Fc region and a second Fc region. In some embodiments, the first Fc region comprises the following mutations: L368D and K370S, and the second Fc region comprises the following mutations: S364K and E357Q. In some embodiments, the first Fc region comprises the following mutations: S364K and E357Q, and the second Fc region comprises the following mutations: L368D and K370S.

### (b) Alternative Knob and Hole: IgG Heterodimerization

[0389] Heterodimerization of polypeptide chains of a CD19 binding molecule comprising paired CH3 domains can be increased by introducing one or more modifications in a CH3 domain which is derived from the IgG1 antibody class. In an embodiment, the modifications comprise a K409R modification to one CH3 domain paired with F405L modification in the second CH3 domain. Additional modifications can also, or alternatively, be at positions 366, 368, 370, 399, 405, 407, and 409. In some cases, heterodimerization of polypeptides comprising such modifications is achieved under reducing conditions, e.g., 10-100 mM 2-MEA (e.g., 25, 50, or 100 mM 2-MEA) for 1-10, e.g., 1.5-5, e.g., 5, hours at 25-37C, e.g., 25C or 37C.

[0390] The amino acid replacements described herein can be introduced into the CH3 domains using techniques which are well known (see, e.g., McPherson, ed., 1991, Directed Mutagenesis: a Practical Approach; Adelman et al., 1983, DNA, 2:183).

[0391] The IgG heterodimerization strategy is further described in, for example, WO2008/119353, WO2011/131746, and WO2013/060867.

[0392] In any of the embodiments described in this Section, the CH3 domains can be additionally modified to introduce a pair of cysteine residues as described in Section 7.2.2.1.3.

### (c) pl (Isoelectric Point) Variants

[0393] In general, as will be appreciated by a skilled artisan, there are two general categories of pl variants: those that increase the pl of the protein (basic changes) and those that decrease the pl of the protein (acidic changes). As described herein, all combinations of these variants can be done: one Fc region can be wild type, or a variant that does not display a significantly different pl from wild-type, and the other can be either more basic or more acidic. Alternatively, each Fc region is changed, one to more basic and one to more acidic.

[0394] Exemplary combinations of pl variants are shown in Table 6. As outlined herein and shown in Table 6, these changes are shown relative to IgG1, but all isotypes can be altered this way, as well as isotype hybrids. In the case where the heavy chain constant domain is from IgG2-4, R133E and R133Q can also be used.

TABLE 6
Exemplary pI Variant Combinations

| Variant constant region | Substitutions |
|---|---|
| pI_ISO(−) | I199T N203D K274Q R355Q N384S |
| | K392N V397M Q419E DEL447 |
| pI_(−)_isosteric_A | N208D Q295E N384D Q418E |
| | N421D |
| pI_(−)_isosteric A-Fc only | Q295E N384D Q418E N421D |
| pI_(−)_isosteric_B | N208D Q295E Q418E N421D |
| pI_(−)_isosteric_B-Fc only | Q295E Q418E N421D |
| pI_ISO(+RR) | Q196K I199T P217R P228R N276K |
| pI_ISO(+) | Q196K I199T N276K |
| pI_(+)_isosteric_A | E269Q E272Q E283Q E357Q |
| pI_(+)_isosteric_B | E269Q E272Q E283Q |
| pI_(+)_isosteric_E269Q/E272Q | E269Q E272Q |
| pI_(+)_isosteric_E269Q/E283Q | E269Q E283Q |
| pI_(+)_isosteric_E272Q/E283Q | E272Q E283Q |
| pI_(+)_isosteric_E269Q | E269Q |

[0395] In one embodiment, for example in the FIG. 1B-1W, FIG. 1Y-1AH, FIG. 2B-2L, and FIG. 2N-2V formats, a combination of pl variants has one Fc region (the negative Fab side) comprising 208D/295E/384D/418E/421 D variants (N208D/Q295E/N384D/Q418E/N421 D when relative to human IgG1) and a second Fc region (the positive scFv side) comprising a positively charged scFv linker, e.g., L36 (described in Section 7.2.2.3). However, as will be appreciated by a skilled artisan, the first Fc region includes a CH1 domain, including position 208. Accordingly, in constructs that do not include a CH1 domain (for example for MBMs that do not utilize a CH1 domain as one of the domains, for example in a format depicted in FIG. 2K), a negative pl variant Fc set can include 295E/384D/418E/421D variants (Q295E/N384D/Q418E/N421D when relative to human IgG1).

[0396] In some embodiments, a first Fc region has a set of substitutions from Table 6 and a second Fc region is connected to a charged linker (e.g., selected from those described in Section 7.2.2.3).

[0397] In some embodiments, the CD19 binding molecule of the present disclosure comprises a first Fc region and a second Fc region. In some embodiments, the first Fc region comprises the following mutations: N208D, Q295E, N384D, Q418E, and N421D. In some embodiments, the second Fc region comprises the following mutations: N208D, Q295E, N384D, Q418E, and N421D.

### (d) Isotopic Variants

[0398] In addition, many embodiments of the disclosure rely on the “importation” of pl amino acids at particular positions from one IgG isotype into another, thus reducing or eliminating the possibility of unwanted immunogenicity being introduced into the variants. A number of these are shown in FIG. 21 of US Publ. 2014/0370013. That is, IgG1 is a common isotype for therapeutic antibodies for a variety of reasons, including high effector function. However, the heavy constant region of IgG1 has a higher pl than that of IgG2 (8.10 versus 7.31). By introducing IgG2 residues at particular positions into the IgG1 backbone, the pl of the resulting Fc region is lowered (or increased) and additionally exhibits longer serum half-life. For example, IgG1 has a glycine (pl 5.97) at position 137, and IgG2 has a glutamic acid (pl 3.22); importing the glutamic acid will affect the pl of the resulting protein. As is described below, a number of amino acid substitutions are generally required to significantly affect the pl of the variant antibody. However, it should be noted as discussed below that even changes in IgG2 molecules allow for increased serum half-life.

[0399] In other embodiments, non-isotypic amino acid changes are made, either to reduce the overall charge state of the resulting protein (e.g., by changing a higher pl amino acid to a lower pl amino acid), or to allow accommodations in structure for stability, as is further described below.

[0400] In addition, by pl engineering both the heavy and light constant domains of a CD19 binding molecule comprising two half antibodies, significant changes in each half antibody can be seen. Having the pls of the two half antibodies differ by at least 0.5 can allow separation by ion exchange chromatography or isoelectric focusing, or other methods sensitive to isoelectric point.

### (e) Calculating pl

[0401] The pl of a half antibody comprising an Fc region and an ABM or ABM chain can depend on the pl of the variant heavy chain constant domain and the pl of the total half antibody, including the variant heavy chain constant domain and ABM or ABM chain. Thus, in some embodiments, the change in pl is calculated on the basis of the variant heavy chain constant domain, using the chart in the FIG. 19 of US Pub. 2014/0370013. As discussed herein, which half antibody to engineer is generally decided by the inherent pl of the half antibodies. Alternatively, the pl of each half antibody can be compared.

(f) pl Variants that Also Confer Better FcRn In Vivo Binding

[0402] In the case where a pl variant decreases the pl of an Fc region, it can have the added benefit of improving serum retention in vivo.

[0403] pl variant Fc regions are believed to provide longer half-lives to antigen binding molecules in vivo, because binding to FcRn at pH 6 in an endosome sequesters the Fc (Ghetie and Ward, 1997, Immunol Today. 18(12): 592-598). The endosomal compartment then recycles the Fc to the cell surface. Once the compartment opens to the extracellular space, the higher pH ˜7.4, induces the release of Fc back into the blood. In mice, Dall'Acqua et al. showed that Fc mutants with increased FcRn binding at pH 6 and pH 7.4 actually had reduced serum concentrations and the same half life as wild-type Fc (Dall'Acqua et al. 2002, J. Immunol. 169:5171-5180). The increased affinity of Fc for FcRn at pH 7.4 is thought to forbid the release of the Fc back into the blood. Therefore, the Fc mutations that will increase Fc's half-life in vivo will ideally increase FcRn binding at the lower pH while still allowing release of Fc at higher pH. The amino acid histidine changes its charge state in the pH range of 6.0 to 7.4. Therefore, it is not surprising to find His residues at important positions in the Fc/FcRn complex.

[0404] It has been suggested that antibodies with variable regions that have lower isoelectric points can also have longer serum half-lives (Igawa et al., 2010, PEDS. 23(5): 385-392). However, the mechanism of this is still poorly understood. Moreover, variable regions differ from antibody to antibody. Constant region variants with reduced pl and extended half-life would provide a more modular approach to improving the pharmacokinetic properties of CD19 binding molecules, as described herein.

### (g) Polar Bridge

[0405] Heterodimerization of polypeptide chains of CD19 binding molecules, e.g., MBMs, comprising an Fc domain can be increased by introducing modifications based on the “polar-bridging” rationale, which is to make residues at the binding interface of the two polypeptide chains to interact with residues of similar (or complimentary) physical property in the heterodimer configuration, while with residues of different physical property in the homodimer configuration. In particular, these modifications are designed so that, in the heterodimer formation, polar residues interact with polar residues, while hydrophobic residues interact with hydrophobic residues. In contrast, in the homodimer formation, residues are modified so that polar residues interact with hydrophobic residues. The favorable interactions in the heterodimer configuration and the unfavorable interactions in the homodimer configuration work together to make it more likely for Fc regions to form heterodimers than to form homodimers.

[0406] In an exemplary embodiment, the above modifications are generated at one or more positions of residues 364, 368, 399, 405, 409, and 411 of a CH3 domain.

[0407] In some embodiments, one or more modifications selected from the group consisting of S364L, T366V, L368Q, N399K, F405S, K409F and R411K are introduced into one of the two CH3 domains. One or more modifications selected from the group consisting of Y407F, K409Q and T411N can be introduced into the second CH3 domain.

[0408] In another embodiment, one or more modifications selected from the group consisting of S364L, T366V, L368Q, D399K, F405S, K409F and T411K are introduced into one CH3 domain, while one or more modifications selected from the group consisting of Y407F, K409Q and T411D are introduced into the second CH3 domain.

[0409] In one exemplary embodiment, the original residue of threonine at position 366 of one CH3 domain is replaced by valine, while the original residue of tyrosine at position 407 of the other CH3 domain is replaced by phenylalanine.

[0410] In another exemplary embodiment, the original residue of serine at position 364 of one CH3 domain is replaced by leucine, while the original residue of leucine at position 368 of the same CH3 domain is replaced by glutamine.

[0411] In yet another exemplary embodiment, the original residue of phenylalanine at position 405 of one CH3 domain is replaced by serine and the original residue of lysine at position 409 of this CH3 domain is replaced by phenylalanine, while the original residue of lysine at position 409 of the other CH3 domain is replaced by glutamine.

[0412] In yet another exemplary embodiment, the original residue of aspartic acid at position 399 of one CH3 domain is replaced by lysine, and the original residue of threonine at position 411 of the same CH3 domain is replaced by lysine, while the original residue of threonine at position 411 of the other CH3 domain is replaced by aspartic acid.

[0413] The amino acid replacements described herein can be introduced into the CH3 domains using techniques which are well known (see, e.g., McPherson, ed., 1991, Directed Mutagenesis: a Practical Approach; Adelman et al., 1983, DNA, 2:183). The polar bridge strategy is described in, for example, WO2006/106905, WO2009/089004 and Gunasekaran et al., 2010, JBC 285:19637-19646.

[0414] Additional polar bridge modifications are described in, for example, PCT publication no. WO2014/145806 (for example, FIG. 6 of WO2014/145806), PCT publication no. WO2014/110601, and PCT publication no. WO 2016/086186, WO 2016/086189, WO 2016/086196 and WO 2016/182751. An example of a polar bridge variant comprises a constant chain comprising a N208D, Q295E, N384D, Q418E and N421D modification.

[0415] In any of the embodiments described herein, the CH3 domains can be additionally modified to introduce a pair of cysteine residues as described in Section 7.2.2.1.3.

[0416] Additional strategies for enhancing heterodimerization are described in, for example, WO2016/105450, WO2016/086186, WO2016/086189, WO2016/086196, WO2016/141378, and WO2014/145806, and WO2014/110601. Any of the strategies can be employed in a CD19 binding molecule described herein.

### 7.2.2.1.6. Combination of Heterodimerization Variants and Other Fc Variants

[0417] As will be appreciated by a skilled artisan, all of the recited heterodimerization variants (including skew and/or pl variants) can be optionally and independently combined in any way, as long as the Fc regions of an Fc domain retain their ability to dimerize. In addition, all of these variants can be combined into any of the heterodimerization formats.

[0418] In the case of pl variants, while embodiments finding particular use are shown in Table 6, other combinations can be generated, following the basic rule of altering the pl difference between two Fc regions in an Fc heterodimer to facilitate purification.

[0419] In addition, any of the heterodimerization variants, skew and pl, are also independently and optionally combined with Fc ablation variants, Fc variants, FcRn variants, as generally outlined herein.

[0420] In some embodiments, a particular combination of skew and pl variants that finds use in the present disclosure is T366S/L368A/Y407V:T366W (optionally including a bridging disulfide, T366S/L368A/Y407V/Y349C:T366W/S354C) with one Fc region comprising Q295E/N384D/Q418E/N481 D and the other a positively charged scFv linker (when the format includes an scFv domain). As will be appreciated by a skilled artisan, the “knobs in holes” variants do not change pl, and thus can be used on either one of the Fc regions in an Fc heterodimer.

[0421] In some embodiments, first and second Fc regions that find use the present disclosure include the amino acid substitutions S364K/E357Q:L368D/K370S, where the first and/or second Fc region includes the ablation variant substitutions 233P/L234V/L235A/G236del/S267K, and the first and/or second Fc region comprises the pl variant substitutions N208D/Q295E/N384D/Q418E/N421D (pl_(−)_isosteric_A).

### 7.2.2.2. Hinge Regions

[0422] The CD19 binding molecules can also comprise hinge regions, e.g., connecting an antigen-binding domain to an Fc region. The hinge region can be a native or a modified hinge region. Hinge regions are typically found at the N-termini of Fc regions.

[0423] A native hinge region is the hinge region that would normally be found between Fab and Fc domains in a naturally occurring antibody. A modified hinge region is any hinge that differs in length and/or composition from the native hinge region. Such hinges can include hinge regions from other species, such as human, mouse, rat, rabbit, shark, pig, hamster, camel, llama or goat hinge regions. Other modified hinge regions can comprise a complete hinge region derived from an antibody of a different class or subclass from that of the heavy chain Fc region. Alternatively, the modified hinge region can comprise part of a natural hinge or a repeating unit in which each unit in the repeat is derived from a natural hinge region. In a further alternative, the natural hinge region can be altered by converting one or more cysteine or other residues into neutral residues, such as serine or alanine, or by converting suitably placed residues into cysteine residues. By such means the number of cysteine residues in the hinge region can be increased or decreased. This approach is described further in U.S. Pat. No. 5,677,425 by Bodmer et al., Altering the number of cysteine residues in a hinge region can, for example, facilitate assembly of light and heavy chains, or increase or decrease the stability of a 0019 binding molecule. Other modified hinge regions can be entirely synthetic and can be designed to possess desired properties such as length, cysteine composition and flexibility.

[0424] A number of modified hinge regions have been described for example, in U.S. Pat. No. 5,677,425, WO9915549, WO2005003170, WO2005003169, WO2005003170, WO9825971 and WO2005003171.

[0425] Examples of suitable hinge sequences are shown in Table 7.

TABLE 7
Hinge Sequences

| Hinge | Hinge | | SEQ ID |
|---|---|---|---|
| Name | Description | Hinge Sequence | NO: |
| H1 | Human IgA1 | VPSTPPTPSPSTPPTPSPS | 1181 |
| H2 | Human IgA2 | VPPPPP | 1182 |
| H3 | Human IgD | ESPKAQASSVPTAQPQAEGSLAKATTAPATTRN | 1183 |
| | | TGRGGEEKKKEKEKEEQEERETKTP | |
| H4 | Human IgG1 | EPKSCDKTHTCPPCP | 1184 |
| H5 | Human IgG2 | ERKCCVECPPCP | 1185 |
| H6 | Human IgG3 | ELKTPLGDTTHTCPRCPEPKSCDTPPPCPRCPE | 1186 |
| | | PKSCDTPPPCPRCPEPKSCDTPPPCPRCP | |
| H7 | Human IgG4 | ESKYGPPCPSCP | 1187 |
| H8 | Human IgG4(P) | ESKYGPPCPPCP | 1188 |
| H9 | Engineered v1 | CPPC | 1179 |
| H10 | Engineered v2 | CPSC | 1189 |
| H11 | Engineered v3 | CPRC | 1190 |
| H12 | Engineered v4 | SPPC | 1191 |
| H13 | Engineered v5 | CPPS | 1192 |
| H14 | Engineered v6 | SPPS | 1180 |
| H15 | Engineered v7 | DKTHTCAA | 1193 |
| H16 | Engineered v8 | DKTHTCPPCPA | 1194 |
| H17 | Engineered v9 | DKTHTCPPCPATCPPCPA | 1195 |
| H18 | Engineered v10 | DKTHTCPPCPATCPPCPATCPPCPA | 1196 |
| H19 | Engineered v11 | DKTHTCPPCPAGKPTLYNSLVMSDTAGTCY | 1197 |
| H20 | Engineered v12 | DKTHTCPPCPAGKPTHVNVSVVMAEVDGTCY | 1198 |
| H21 | Engineered v13 | DKTHTCCVECPPCPA | 1199 |
| H22 | Engineered v14 | DKTHTCPRCPEPKSCDTPPPCPRCPA | 1200 |
| H23 | Engineered v15 | DKTHTCPSCPA | 1201 |

[0426] In one embodiment, the heavy chain Fc region possesses an intact hinge region at its N-terminus.

[0427] In one embodiment, the heavy chain Fc region and hinge region are derived from IgG4 and the hinge region comprises the modified sequence CPPC (SEQ ID NO: 1179). The core hinge region of human IgG4 contains the sequence CPSC (SEQ ID NO: 1189) compared to IgG1 which contains the sequence CPPC (SEQ ID NO: 1179). The serine residue present in the IgG4 sequence leads to increased flexibility in this region, and therefore a proportion of molecules form disulfide bonds within the same protein chain (an intrachain disulfide) rather than bridging to the other heavy chain in the IgG molecule to form the interchain disulfide. (Angel et al., 1993, Mol Immunol 30(1):105-108). Changing the serine residue to a proline to give the same core sequence as IgG1 allows complete formation of inter-chain disulfides in the IgG4 hinge region, thus reducing heterogeneity in the purified product. This altered isotype is termed IgG4P.

### 7.2.2.3. ABM Linkers

[0428] In certain aspects, the present disclosure provides CD19 binding molecules where two or more components of an ABM (e.g., a VH and a VL of an scFv), two or more ABMs, or an ABM and a non-ABM domain (e.g., a dimerization domain such as an Fc region) are connected to one another by a peptide linker. Such linkers are referred to herein an “ABM linkers.”

[0429] A peptide linker can range from 2 amino acids to 60 or more amino acids, and in certain aspects a peptide linker ranges from 3 amino acids to 50 amino acids, from 4 to 30 amino acids, from 5 to 25 amino acids, from 10 to 25 amino acids or from 12 to 20 amino acids. In particular embodiments, a peptide linker is 2 amino acids, 3 amino acids, 4 amino acid, 5 amino acids, 6 amino acids, 7 amino acids, 8 amino acids, 9 amino acids, 10 amino acids, 11 amino acids, 12 amino acids, 13 amino acids, 14 amino acid, 15 amino acids, 16 amino acids, 17 amino acids, 18 amino acids, 19 amino acids, 20 amino acids, 21 amino acids, 22 amino acids, 23 amino acids, 24 amino acid, 25 amino acids, 26 amino acids, 27 amino acids, 28 amino acids, 29 amino acids, 30 amino acids, 31 amino acids, 32 amino acids, 33 amino acids, 34 amino acid, 35 amino acids, 36 amino acids, 37 amino acids, 38 amino acids, 39 amino acids, 40 amino acids, 41 amino acids, 42 amino acids, 43 amino acids, 44 amino acid, 45 amino acids, 46 amino acids, 47 amino acids, 48 amino acids, 49 amino acids, or 50 amino acids in length.

[0430] Charged and/or flexible linkers can be used.

[0431] Examples of flexible ABM linkers that can be used in the CD19 binding molecules include those disclosed by Chen et al., 2013, Adv Drug Deliv Rev. 65(10):1357-1369 and Klein et al., 2014, Protein Engineering, Design & Selection 27(10):325-330. A particularly useful flexible linker is (GGGGS)n (also referred to as (G4S)n) (SEQ ID NO: 1171). In some embodiments, n is any number between 1 and 10, i.e., 1, 2, 3, 4, 5, 6, 7, 8, 9, and 10, or any range bounded by any two of the foregoing numbers, e.g., 1 to 5, 2 to 5, 3 to 6, 2 to 4, 1 to 4, and so on and so forth.

[0432] Other examples of suitable ABM linkers for use in the CD19 binding molecules of the present disclosure are shown in Table 8 below:

TABLE 8
ABM Linker Sequences

| | | SEQ ID |
|---|---|---|
| Linker Name | Linker Sequence | NO: |
| L1 | ADAAP | 1202 |
| L2 | ADAAPTVSIFP | 1203 |
| L3 | ADAAPTVSIFPP | 1204 |
| L4 | AKTTAP | 1205 |
| L5 | AKTTAPSVYPLAP | 1206 |
| L6 | AKTTPKLEEGEFSEARV | 1207 |
| L7 | AKTTPKLGG | 1208 |
| L8 | AKTTPP | 1209 |
| L9 | AKTTPPSVTPLAP | 1210 |
| L10 | ASTKGP | 1211 |
| L11 | ASTKGPSVFPLAP | 1212 |
| L12 | ASTKGPSVFPLAPASTKGPSVFPLAP | 1213 |
| L13 | EGKSSGSGSESKST | 1214 |
| L14 | GEGESGEGESGEGES | 1215 |
| L15 | GEGESGEGESGEGESGEGES | 1217 |
| L16 | GEGGSGEGGSGEGGS | 1218 |
| L17 | GENKVEYAPALMALS | 1219 |
| L18 | GGEGSGGEGSGGEGS | 1220 |
| L19 | GGGESGGEGSGEGGS | 1222 |
| L20 | GGGESGGGESGGGES | 1223 |
| L21 | (GGGGS)ₙ (also referred to as (G4S)ₙ), | 1224 |
| | where n can be 1-10. | |
| L22 | GGGGSGGGGS | 1168 |
| L23 | GGGGSGGGGSGGGGS | 1174 |
| L24 | GGGGSGGGGSGGGGSGGGGS | 1173 |
| L25 | GGGKSGGGKSGGGKS | 1227 |
| L26 | GGGKSGGKGSGKGGS | 1228 |
| L27 | GGKGSGGKGSGGKGS | 1229 |
| L28 | GGSGG | 1230 |
| L29 | GGSGGGGSG | 1231 |
| L30 | GGSGGGGSGGGGS | 1232 |
| L31 | GHEAAAVMQVQYPAS | 108 |
| L32 | GKGGSGKGGSGKGGS | 109 |
| L33 | GKGKSGKGKSGKGKS | 110 |
| L34 | GKGKSGKGKSGKGKSGKGKS | 111 |
| L35 | GKPGSGKPGSGKPGS | 112 |
| L36 | GKPGSGKPGSGKPGSGKPGS | 1233 |
| L37 | GPAKELTPLKEAKVS | 1234 |
| L38 | GSAGSAAGSGEF | 1235 |
| L39 | IRPRAIGGSKPRVA | 1236 |
| L40 | KESGSVSSEQLAQFRSLD | 1237 |
| L41 | KTTPKLEEGEFSEAR | 1238 |
| L42 | QPKAAP | 1239 |
| L43 | QPKAAPSVTLFPP | 1240 |
| L44 | RADAAAA(G4S)₄ | 1241 |
| L45 | RADAAAAGGPGS | 1242 |
| L46 | RADAAP | 1243 |
| L47 | RADAAPTVS | 1244 |
| L48 | SAKTTP | 1245 |
| L49 | SAKTTPKLEEGEFSEARV | 1246 |
| L50 | SAKTTPKLGG | 1247 |
| L51 | STAGDTHLGGEDFD | 1248 |
| L52 | TVAAP | 1249 |
| L53 | TVAAPSVFIFPP | 1250 |
| L54 | TVAAPSVFIFPPTVAAPSVFIFPP | 1251 |
| L55 | GSTSGSGKPGSGEGSTKG | 1178 |
| L56 | PRGASKSGSASQTGSAPGS | 1252 |
| L57 | GTAAAGAGAAGGAAAGAAG | 134 |
| L58 | GTSGSSGSGSGGSGSGGGG | 135 |

[0433] In various aspects, the disclosure provides a CD19 binding molecule which comprises one or more ABM linkers. Each of the ABM linkers can be range from 2 amino acids to 60 amino acids in length, e.g., 4 to 30 amino acids, from 5 to 25 amino acids, from 10 to 25 amino acids or from 12 to 20 amino acids in length, optionally selected from Table 8 above. In particular embodiments, the CD19 binding molecule comprises two, three, four, five or six ABM linkers. The ABM linkers can be on one, two, three, four or even more polypeptide chains of the CD19 binding molecule.

### 7.2.3. Bispecific Binding Molecule Configurations

[0434] Exemplary BBM configurations are shown in FIG. 1. FIG. 1A shows the components of the BBM configurations shown in FIGS. 1B1-1AH. The scFv, Fab, scFab, non-immunoglobulin based ABM, and Fc domains each can have the characteristics described for these components in Sections 7.2.1 and 7.2.2. The components of the BBM configurations shown in FIG. 1 can be associated with each other by any of the means described in Sections 7.2.1 and 7.2.2 (e.g., by direct bonds, ABM linkers, disulfide bonds, Fc domains with modified with knob in hole interactions, etc.). The orientations and associations of the various components shown in FIG. 1 are merely exemplary; as will be appreciated by a skilled artisan, other orientations and associations can be suitable (e.g., as described in Sections 7.2.1 and 7.2.2).

[0435] BBMs are not limited to the configurations shown in FIG. 1. Other configurations that can be used are known to those skilled in the art. See, e.g., WO 2014/145806; WO 2017/124002; Liu et al., 2017, Front Immunol. 8:38; Brinkmann & Kontermann, 2017, mAbs 9:2, 182-212; US 2016/0355600; Klein et al., 2016, MAbs 8(6):1010-20; and US 2017/0145116.

### 7.2.3.1. Exemplary Bivalent BBMs

[0436] The BBMs can be bivalent, i.e., they have two antigen-binding domains, one of which binds CD19 (ABM1) and one of which binds a second target antigen (ABM2), e.g., a component of a TCR complex.

[0437] Exemplary bivalent BBM configurations are shown in FIGS. 1B-1F.

[0438] As depicted in FIGS. 1B-1D, a BBM can comprise two half antibodies, one comprising one ABM and the other comprising one ABM, the two halves paired through an Fc domain.

[0439] In the embodiment of FIG. 1B, the first (or left) half antibody comprises a Fab and an Fc region, and the second (or right) half antibody comprises a Fab and an Fc region. The first and second half antibodies are associated through the Fc regions forming an Fc domain.

[0440] In the embodiment of FIG. 1C, the first (or left) half antibody comprises a Fab and an Fc region, and the second (or right) half antibody comprises a scFv and an Fc region. The first and second half antibodies are associated through the Fc regions forming an Fc domain.

[0441] In the embodiment of FIG. 1D, the first (or left) half antibody comprises an scFv and an Fc region, and the second (or right) half antibody comprises an scFv and an Fc region. The first and second half antibodies are associated through the Fc regions forming an Fc domain.

[0442] As depicted in FIGS. 1E-1F, a bivalent BBM can comprise two ABMs attached to one Fc region of an Fc domain.

[0443] In the embodiment of FIG. 1E, the BBM comprises a Fab, a scFv and an Fc domain, where the scFv is located between the Fab and the Fc domain.

[0444] In the embodiment of FIG. 1F, (the “one-arm scFv-mAb” configuration) BBM comprises a Fab, a scFv and an Fc domain, where the Fab is located between the scFv and the Fc domain.

[0445] In the configuration shown in FIGS. 1B-1F, each of X and Y represent either ABM1 or ABM2, provided that the BBM comprises one ABM1 and one ABM2. Accordingly, the present disclosure provides a bivalent BBM as shown in any one of FIGS. 1B through 1F, where X is an ABM1 and Y is an ABM2 (this configuration of ABMs designated as “1” for convenience). The present disclosure also provides a bivalent BBM as shown in any one of FIGS. 1B through 1F, where X is an ABM2 and Y is an ABM1 (this configuration of ABMs designated as “B2” for convenience).

### 7.2.3.2. Exemplary Trivalent BBMs

[0446] The BBMs can be trivalent, i.e., they have three antigen-binding domains, one or two of which binds CD19 (ABM1) and one or two of which binds a second target antigen (ABM2), e.g., a component of a TCR complex.

[0447] Exemplary trivalent BBM configurations are shown in FIGS. 1G-1Z.

[0448] As depicted in FIGS. 1G-1N, 1Q-1W, 1Y-1Z a BBM can comprise two half antibodies, one comprising two ABMs and the other comprising one ABM, the two halves paired through an Fc domain.

[0449] In the embodiment of FIG. 1G, the first (or left) half antibody comprises Fab and an Fc region, and the second (or right) half antibody comprises a scFv, a Fab, and an Fc region. The first and second half antibodies are associated through the Fc regions forming an Fc domain.

[0450] In the embodiment of FIG. 1H, the first (or left) half antibody comprises a Fab and an Fc region, and the second (or right) half antibody comprises a Fab, an scFv, and an Fc region. The first and second half antibodies are associated through the Fc regions forming an Fc domain.

[0451] In the embodiment of FIG. 1I, the first (or left) half antibody comprises an scFv and an Fc region, and the second (or right) half antibody comprises two Fabs and an Fc region. The first and second half antibodies are associated through the Fc regions forming an Fc domain.

[0452] In the embodiment of FIG. 1J, the first (or left) half antibody comprises two Fav and an Fc region, and the second (or right) half antibody comprises a Fab and an Fc region. The first and second half antibodies are associated through the Fc regions forming an Fc domain.

[0453] In the embodiment of FIG. 1K, the first (or left) half antibody comprises an scFv and an Fc region, and the second (or right) half antibody comprises two scFvs and an Fc region. The first and second half antibodies are associated through the Fc regions forming an Fc domain.

[0454] In the embodiment of FIG. 1L, the first (or left) half antibody comprises an scFv and an Fc region, and the second (or right) half antibody comprises an scFv, a Fab, and an Fc region. The first and second half antibodies are associated through the Fc regions forming an Fc domain.

[0455] In the embodiment of FIG. 1M, the first (or left) half antibody comprises a scFv and an Fc region, and the second (or right) half antibody comprises a Fab, a scFv and an Fc region. The first and second half antibodies are associated through the Fc regions forming an Fc domain.

[0456] In the embodiment of FIG. 1N, the first (or left) half antibody comprises a diabody-type binding domain and an Fc region, and the second (or right) half antibody comprises a Fab and an Fc region. The first and second half antibodies are associated through the Fc regions forming an Fc domain.

[0457] In the embodiment of FIG. 1Q, the first (or left) half antibody comprises a Fab and an Fc region, and the second (or right) half antibody comprises a Fab, an Fc region, and an scFv. The first and second half antibodies are associated through the Fc regions forming an Fc domain.

[0458] In the embodiment of FIG. 1R, the first (or left) half antibody comprises a scFv and an Fc region, and the second (or right) half antibody comprises a Fab, an Fc region, and an scFv. The first and second half antibodies are associated through the Fc regions forming an Fc domain.

[0459] In the embodiment of FIG. 1S, the first (or left) half antibody comprises an scFv and an Fc region, and the second (or right) half antibody comprises an scFv, an Fc region, and a second scFv. The first and second half antibodies are associated through the Fc regions forming an Fc domain.

[0460] In the embodiment of FIG. 1T, the first (or left) half antibody comprises an scFv, an Fc region, and a Fab, and the second (or right) half antibody comprises a Fab and an Fc region. The first and second half antibodies are associated through the Fc regions forming an Fc domain.

[0461] In the embodiment of FIG. 1U, the first (or left) half antibody comprises two Fab and an Fc region, and the second (or right) half antibody comprises a non-immunoglobulin based ABM and an Fc region. The first and second half antibodies are associated through the Fc regions forming an Fc domain.

[0462] In the embodiment of FIG. 1V, the first (or left) half antibody comprises a Fab, an scFv, and an Fc region, and the second (or right) half antibody comprises a non-immunoglobulin based ABM and an Fc region. The first and second half antibodies are associated through the Fc regions forming an Fc domain.

[0463] In the embodiment of FIG. 1W, the first (or left) half antibody comprises a Fab and an Fc region, and the second (or right) half antibody comprises a scFv, a non-immunoglobulin based ABM, and an Fc region. The first and second half antibodies are associated through the Fc regions forming an Fc domain.

[0464] In the embodiment of FIG. 1Y, the first (or left) half antibody comprises an scFv and an Fc region, and the second (or right) half antibody comprises a Fab, an scFv and an Fc region. The first and second half antibodies are associated through the Fc regions forming an Fc domain.

[0465] In the embodiment of FIG. 1Z, the first (or left) half antibody comprises a Fab, an Fc region, and a scFab, and the second (or right) half antibody comprises a Fab and an Fc region. The first and second half antibodies are associated through the Fc regions forming an Fc domain.

[0466] Alternatively, as depicted in FIGS. 1O and 1P, trivalent a BBM can comprise two half antibodies, each comprising one complete ABM (a Fab in FIGS. 1O and 1P) and a portion of another ABM (one a VH, the other a VL). The two half antibodies are paired through an Fc domain, whereupon the VH and the VL associate to form a complete antigen-binding Fv domain.

[0467] The BBM can be a single chain, as shown in FIG. 1X. The BBM of FIG. 1X comprises three scFv domains connected through linkers.

[0468] In the configuration shown in FIGS. 1G-1Z, each of X, Y and A represent either an ABM1 or ABM2, provided that the BBM comprises at least ABM1 and at least one ABM2. Thus, the trivalent MBMs will include one or two ABM1s and one or two ABM2s. In some embodiments, a trivalent BBM comprises two ABM1s and one ABM2. In other embodiments, a trivalent BBM of the disclosure comprises one ABM1 and two ABM2s.

[0469] Accordingly, in the present disclosure provides a trivalent BBM as shown in any one of FIGS. 1G through 1Z, where X is an ABM1, Y is an ABM1 and A is an ABM2 (this configuration of ABMs designated as “T1” for convenience).

[0470] The disclosure further provides a trivalent BBM as shown in any one of FIGS. 1G through 1Z, where X is an ABM1, Y is an ABM2 and A is an ABM1 (this configuration of ABMs designated as “T2” for convenience).

[0471] The disclosure further provides a trivalent BBM as shown in any one of FIGS. 1G through 1Z, where X is an ABM2, Y is an ABM1 and A is an ABM1 (this configuration of ABMs designated as “T3” for convenience).

[0472] The disclosure further provides a trivalent BBM as shown in any one of FIGS. 1G through 1Z, where X is an ABM1, Y is an ABM2 and A is an ABM2 (this configuration of ABMs designated as “T4” for convenience).

[0473] The disclosure further provides a trivalent BBM as shown in any one of FIGS. 1G through 1Z, where X is an ABM2, Y is an ABM1 and A is an ABM2 (this configuration of ABMs designated as “T5” for convenience).

[0474] The disclosure further provides a trivalent BBM as shown in any one of FIGS. 1G through 1Z, where X is an ABM2, Y is an ABM2 and A is an ABM1 (this configuration of ABMs designated as “T6” for convenience).

### 7.2.3.3. Exemplary Tetravalent BBMs

[0475] The BBMs can be tetravalent, i.e., they have four antigen-binding domains, one, two, or three of which binds CD19 (ABM1) and one, two, or three of which binds a second target antigen (ABM2), e.g., a component of a TCR complex.

[0476] Exemplary tetravalent BBM configurations are shown in FIGS. 1AA-1AH.

[0477] As depicted in FIGS. 1AA-1AH, a tetravalent BBM can comprise two half antibodies, each comprising two complete ABMs, the two halves paired through an Fc domain.

[0478] In the embodiment of FIG. 1AA, the first (or left) half antibody comprises a Fab, an Fc region, and an scFv, and the second (or right) half antibody comprises a Fab, an Fc region, and an scFv. The first and second half antibodies are associated through the Fc regions forming an Fc domain.

[0479] In the embodiment of FIG. 1AB, the first (or left) half antibody comprises a Fab, an scFv, and an Fc region, and the second (or right) half antibody comprises a Fab, an scFv, and an Fc region. The first and second half antibodies are associated through the Fc regions forming an Fc domain.

[0480] In the embodiment of FIG. 1AC, the first (or left) half antibody comprises an scFv, a Fab, and an Fc region, and the second (or right) half antibody comprises an scFv, a Fab, and an Fc region. The first and second half antibodies are associated through the Fc regions forming an Fc domain.

[0481] In the embodiment of FIG. 1AD, the first (or left) half antibody comprises a Fab, an Fc region, and a second Fab, and the second (or right) half antibody comprises a Fab, an Fc region, and a second Fab. The first and second half antibodies are associated through the Fc regions forming an Fc domain.

[0482] In the embodiment of FIG. 1AE, the first (or left) half antibody comprises an scFv, a second scFv, and an Fc region, and the second (or right) half antibody comprises an scFv, a second scFv, and an Fc region. The first and second half antibodies are associated through the Fc regions forming an Fc domain.

[0483] In the embodiment of FIG. 1AF, the first (or left) half antibody comprises a Fab, an scFv, and an Fc region, and the second (or right) half antibody comprises a Fab, an scFv, and an Fc region. The first and second half antibodies are associated through the Fc regions forming an Fc domain.

[0484] In the embodiment of FIG. 1AG, the first (or left) half antibody comprises a Fab, an Fc region, and an scFv, and the second (or right) half antibody comprises a scFv, an Fc region, and a Fab. The first and second half antibodies are associated through the Fc regions forming an Fc domain.

[0485] In the embodiment of FIG. 1AH, the first (or left) half antibody comprises a scFv, an Fc region, and an Fab, and the second (or right) half antibody comprises a scFv, an Fc region, and a Fab. The first and second half antibodies are associated through the Fc regions forming an Fc domain.

[0486] In the configuration shown in FIGS. 1AA-1AH, each of X, Y, A, and B represent ABM1 or ABM2, although not necessarily in that order, and provided that the BBM comprises at least one ABM1 and at least one ABM2. Thus, the tetravalent ABMs will include one, two, or three ABM1s and one, two, or ABM2s. In some embodiments, a tetravalent BBM comprises three ABM1s and one ABM2. In other embodiments, a tetravalent BBM comprises two ABM1s two ABM2s. In yet other embodiments, a tetravalent BBM comprises one ABM1 and three ABM2s.

[0487] Accordingly, in the present disclosure provides a tetravalent BBM as shown in any one of FIGS. 1AA-1AH, where X is an ABM1 and each of Y, A, and B are ABM2s (this configuration of ABMs designated as “Tv 1” for convenience).

[0488] The disclosure further provides a tetravalent BBM as shown in any one of FIGS. 1AA-1AH, where Y is an ABM1 and each of X, A, and B are ABM2s (this configuration of ABMs designated as “Tv 2” for convenience).

[0489] The disclosure further provides a tetravalent BBM as shown in any one of FIGS. 1AA-1AH, where A is an ABM1 and each of X, Y, and B are ABM2s (this configuration of ABMs designated as “Tv 3” for convenience).

[0490] The disclosure further provides a tetravalent BBM as shown in any one of FIGS. 1AA-1AH, where B is an ABM1 and each of X, Y, and A are ABM2s (this configuration of ABMs designated as “Tv 4” for convenience).

[0491] The disclosure further provides a tetravalent BBM as shown in any one of FIGS. 1AA-1AH, where X and Y are both ABM1s and both of A and B are ABM2s (this configuration of ABMs designated as “Tv 5” for convenience).

[0492] The disclosure further provides a tetravalent BBM as shown in any one of FIGS. 1AA-1AH, where X and A are both ABM1s and both of Y and B are ABM2s (this configuration of ABMs designated as “Tv 6” for convenience).

[0493] The disclosure further provides a tetravalent BBM as shown in any one of FIGS. 1AA-1AH, where X and B are both ABM1s and both of Y and A are ABM2s (this configuration of ABMs designated as “Tv 7” for convenience).

[0494] The disclosure further provides a tetravalent BBM as shown in any one of FIGS. 1AA-1AH, where Y and A are both ABM1s and both of X and B are ABM2s (this configuration of ABMs designated as “Tv 8” for convenience).

[0495] The disclosure further provides a tetravalent BBM as shown in any one of FIGS. 1AA-1AH, where Y and B are both ABM1s and both of X and A are ABM2s (this configuration of ABMs designated as “Tv 9” for convenience).

[0496] The disclosure further provides a tetravalent BBM as shown in any one of FIGS. 1AA-1AH, where A and B are both ABM1s and both of X and Y are ABM2s (this configuration of ABMs designated as “Tv 10” for convenience).

[0497] The disclosure further provides a tetravalent BBM as shown in any one of FIGS. 1AA-1AH, where each of X, Y, and A is an ABM1 and B is an ABM2 (this configuration of ABMs designated as “Tv 11” for convenience).

[0498] The disclosure further provides a tetravalent BBM as shown in any one of FIGS. 1AA-1AH, where each of X, Y, and B is an ABM1 and A is an ABM2 (this configuration of ABMs designated as “Tv 12” for convenience).

[0499] The disclosure further provides a tetravalent BBM as shown in any one of FIGS. 1AA-1AH, where each of X, A, and B is an ABM1 and Y is an ABM2 (this configuration of ABMs designated as “Tv 13” for convenience).

[0500] The disclosure further provides a tetravalent BBM as shown in any one of FIGS. 1AA-1AH, where each of Y, A, and B is an ABM1 and X is an ABM2 (this configuration of ABMs designated as “Tv 14” for convenience).

### 7.2.4. Trispecific Binding Molecule Configurations

[0501] Exemplary TBM configurations are shown in FIG. 2. FIG. 2A shows the components of the TBM configurations shown in FIGS. 2B-1V. The scFv, Fab, non-immunoglobulin based ABM, and Fc each can have the characteristics described for these components in Sections 7.2.1 and 7.2.2. The components of the TBM configurations shown in FIG. 2 can be associated with each other by any of the means described in Sections 7.2.1 and 7.2.2 (e.g., by direct bonds, ABM linkers, disulfide bonds, Fc domains with modified with knob in hole interactions, etc.). The orientations and associations of the various components shown in FIG. 2 are merely exemplary; as will be appreciated by a skilled artisan, other orientations and associations can be suitable (e.g., as described in Sections 7.2.1 and 7.2.2).

[0502] TBMs are not limited to the configurations shown in FIG. 2. Other configurations that can be used are known to those skilled in the art. See, e.g., WO 2014/145806; WO 2017/124002; Liu et al., 2017, Front Immunol. 8:38; Brinkmann & Kontermann, 2017, mAbs 9:2, 182-212; US 2016/0355600; Klein et al., 2016, MAbs 8(6):1010-20; and US 2017/0145116.

### 7.2.4.1. Exemplary Trivalent TBMs

[0503] TBMs can be trivalent, i.e., they have three antigen-binding domains, one of which binds CD19, one of which binds a component of a TCR complex, and one of which binds either CD2 or a TAA.

[0504] Exemplary trivalent TBM configurations are shown in FIGS. 2B through 2P.

[0505] As depicted in FIGS. 2B-2K and 2N-2P, a TBM can comprise two half antibodies, one comprising two ABMs and the other comprising one ABM, the two halves paired through an Fc domain.

[0506] In the embodiment of FIG. 2B, the first (or left) half antibody comprises an scFv and an Fc region, and the second (or right) half antibody comprises a Fab, an scFv and an Fc region. The first and second half antibodies are associated through the Fc regions forming an Fc domain.

[0507] In the embodiment of FIG. 2C, the first (or left) half antibody comprises two Fab and an Fc region, and the second (or right) half antibody comprises a Fab and an Fc region. The first and second half antibodies are associated through the Fc regions forming an Fc domain.

[0508] In the embodiment of FIG. 2D, the first (or left) half antibody comprises a Fab, an scFv and an Fc region, and the second (or right) half antibody comprises a Fab and an Fc region. The first and second half antibodies are associated through the Fc regions forming an Fc domain.

[0509] In the embodiment of FIG. 2E, the first (or left) half antibody comprises an scFv and an Fc region, and the second (or right) half antibody comprises two Fab and an Fc region. The first and second half antibodies are associated through the Fc regions forming an Fc domain.

[0510] In the embodiment of FIG. 2F, the first (or left) half antibody comprises an scFv, an Fc region, and a Fab, and the second (or right) half antibody comprises a Fab and an Fc region. The first and second half antibodies are associated through the Fc regions forming an Fc domain.

[0511] In the embodiment of FIG. 2G, the first (or left) half antibody comprises an scFv and an Fc region, and the second (or right) half antibody comprises a Fab an Fc region, and an scFV. The first and second half antibodies are associated through the Fc regions forming an Fc domain.

[0512] In the embodiment of FIG. 2H, the first (or left) half antibody comprises two Fab and an Fc region, and the second (or right) half antibody comprises a non-immunoglobulin based ABM and an Fc region. The first and second half antibodies are associated through the Fc regions forming an Fc domain.

[0513] In the embodiment of FIG. 21, the first (or left) half antibody comprises a Fab, an scFv, and an Fc region, and the second (or right) half antibody comprises a non-immunoglobulin based ABM and an Fc region. The first and second half antibodies are associated through the Fc regions forming an Fc domain.

[0514] In the embodiment of FIG. 2J, the first (or left) half antibody comprises a Fab and an Fc region, and the second (or right) half antibody comprises an scFv, a non-immunoglobulin based ABM and an Fc region. The first and second half antibodies are associated through the Fc regions forming an Fc domain.

[0515] In the embodiment of FIG. 2K, the first (or left) half antibody comprises an scFv and an Fc region, and the second (or right) half antibody comprises an scFv, an Fc region, and a second scFv. The first and second half antibodies are associated through the Fc regions forming an Fc domain.

[0516] In the embodiment of FIG. 2N, the first (or left) half antibody comprises a Fab, an Fc region, and an scFv, and the second (or right) half antibody comprises a Fab, and an Fc region. The first and second half antibodies are associated through the Fc regions forming an Fc domain.

[0517] In the embodiment of FIG. 20, the first (or left) half antibody comprises a Fab, an Fc region, and a scFab, and the second (or right) half antibody comprises a Fab and an Fc region. The first and second half antibodies are associated through the Fc regions forming an Fc domain.

[0518] In the embodiment of FIG. 2P, the first (or left) half antibody comprises a Fab, a non-immunoglobulin based ABM, and an Fc region, and the second (or right) half antibody comprises a scFv and an Fc region. The first and second half antibodies are associated through the Fc regions forming an Fc domain.

[0519] Alternatively, as depicted in FIG. 2L, trivalent a TBM can comprise two half antibodies, each comprising one complete ABM and a portion of another ABM (one a VH, the other a VL). The two half antibodies are paired through an Fc domain, whereupon the VH and the VL associate to form a complete antigen-binding Fv domain.

[0520] The TBM can be a single chain, as shown in FIG. 2M. The TBM of FIG. 2M comprises three scFv domains connected through linkers.

[0521] In each of the configurations shown in FIGS. 2B-2P, each of the domains designated X, Y, and Z represents an ABM1, ABM2, or ABM3, although not necessarily in that order. In other words, X can be ABM1, ABM2, or ABM3, Y can be ABM1, ABM2, or ABM3, and Z can be ABM1, ABM2, or ABM3, provided that the TBM comprises one ABM1, one ABM2, and one ABM3.

[0522] Accordingly, in the present disclosure provides a trivalent TBM as shown in any one of FIGS. 2B through 2P, where X is an ABM1, Y is an ABM3 and Z is an ABM2 (this configuration of ABMs designated as “T1” for convenience).

[0523] The present disclosure also provides a trivalent TBM as shown in any one of FIGS. 2B through 2P, where X is an ABM1, Y is an ABM2, and Z is an ABM3 (this configuration of ABMs designated as “T2” for convenience).

[0524] The present disclosure further provides a trivalent TBM as shown in any one of FIGS. 2B through 2P, where X is an ABM3, Y is an ABM1, and Z is an ABM2 (this configuration of ABMs designated as “T3” for convenience).

[0525] The present disclosure yet further provides a trivalent TBM as shown in any one of FIGS. 2B through 2P, where X is an ABM3, Y is an ABM2, and Z is an ABM1 (this configuration of ABMs designated as “T4” for convenience).

[0526] The present disclosure yet further provides a trivalent TBM as shown in any one of FIGS. 2B through 2P, where X is an ABM2, Y is an ABM1, and Z is an ABM3 (this configuration of ABMs designated as “T5” for convenience).

[0527] The present disclosure yet further provides a trivalent TBM as shown in any one of FIGS. 2B through 2P, where X is an ABM2, Y is an ABM3, and Z is an ABM1 (this configuration of ABMs designated as “T6” for convenience).

### 7.2.4.2. Exemplary Tetravalent TBMs

[0528] The TBMs of the disclosure can be tetravalent, i.e., they have four antigen-binding domains, one or two of which binds CD19, one or two of which binds a component of a TCR complex, and one or two of which binds CD2 or a TAA.

[0529] Exemplary tetravalent TBM configurations are shown in FIGS. 2Q-2S.

[0530] As depicted in FIGS. 2Q-2S, a tetravalent TBM can comprise two half antibodies, each comprising two complete ABMs, the two halves paired through an Fc domain.

[0531] In the embodiment of FIG. 2Q, the first (or left) half antibody comprises a Fab, an Fc region, and a second Fab, and the second (or right) half antibody comprises a Fab, an Fc region, and a second Fab. The first and second half antibodies are associated through the Fc regions forming an Fc domain.

[0532] In the embodiment of FIG. 2R, the first (or left) half antibody comprises a Fab, an Fc region, and an scFv, and the second (or right) half antibody comprises a Fab, an Fc region, and an scFv. The first and second half antibodies are associated through the Fc regions forming an Fc domain.

[0533] In the embodiment of FIG. 2S, the first (or left) half antibody comprises a Fab, an Fc region, and an scFv, and the second (or right) half antibody comprises an scFv, an Fc region, and a Fab. The first and second half antibodies are associated through the Fc regions forming an Fc domain.

[0534] In the configuration shown in FIGS. 2Q-2S, each of X, Y, Z, and A represent an ABM1, an ABM2, or an ABM3, although not necessarily in that order, and provided that the TBM comprises at least one ABM1, at least one ABM2, and at least one ABM3. Thus, the tetravalent ABMs will include two ABMs against one of CD19, a component of a TCR complex, and CD2 or a TAA. In some cases, a tetravalent TBM has two CD19 ABMs.

### 7.2.4.3. Exemplary Pentavalent TBMs

[0535] The TBMs of the disclosure can be pentavalent, i.e., they have five antigen-binding domains, one, two, or three of which binds CD19, one, two, or three of which binds a component of a TCR complex, and one, two, or three of which binds CD2 or a TAA.

[0536] An exemplary pentavalent TBM configuration is shown in FIG. 2T.

[0537] As depicted in FIG. 2T, a pentavalent TBM can comprise two half antibodies, one of which comprises two complete ABMs and the other of which comprises one complete ABM, the two halves paired through an Fc domain.

[0538] In the embodiment of FIG. 2T, the first (or left) half antibody comprises a Fab, an scFv, and an Fc region, and the second (or right) half antibody comprises a Fab, an Fc region, and an scFv. The first and second half antibodies are associated through the Fc regions forming an Fc domain.

[0539] In the configuration shown in FIG. 2T, each of X, Y, Z, A, and B represent an ABM1, an ABM2, or an ABM3, although not necessarily in that order, and provided that the TBM comprises at least one ABM1, one ABM2, and one ABM3. Thus, the pentavalent TBMs can include two ABMs against two of CD19, a component of a TCR complex, and CD2 or a TAA, or three ABMs against one of CD19, a component of a TCR complex, and CD2 or a TAA. In some cases, a pentavalent TBM has two or three CD19 ABMs. In some embodiments, a pentavalent TBM has three ABM1s, one ABM2 and one ABM3.

### 7.2.4.4. Exemplary Hexavalent TBMs

[0540] The TBMs of the disclosure can be hexavalent, i.e., they have six antigen-binding domains, one, two, three, or four of which binds CD19, one, two, three, or four of which binds a component of a TCR complex, and one, two, three, or four of which binds CD2 or a TAA.

[0541] Exemplary hexavalent TBM configurations are shown in FIGS. 2U-2V.

[0542] As depicted in FIGS. 2U-2V, a pentavalent TBM can comprise two half antibodies, one of which comprises two complete ABMs and the other of which comprises one complete ABM, the two halves paired through an Fc domain.

[0543] In the embodiment of FIG. 2U, the first (or left) half antibody comprises a Fab, a second Fab, an Fc region, and an scFv, and the second (or right) half antibody comprises a Fab, a second Fab, an Fc region, and an scFv. The first and second half antibodies are associated through the Fc regions forming an Fc domain.

[0544] In the embodiment of FIG. 2V, the first (or left) half antibody comprises a first Fv, a second Fv, a third Fv, and an Fc region, and the second (or right) half antibody comprises a first Fv, a second Fv, a third Fv, and an Fc region. The first and second half antibodies are associated through the Fc regions forming an Fc domain.

[0545] In the configuration shown in FIGS. 2U-2V, each of X, Y, Z, A, B, and C represent an ABM1, an ABM2, or an ABM3, although not necessarily in that order, and provided that the TBM comprises at least one ABM1, one ABM2, and one ABM3. Thus, the hexavalent TBMs can include (i) two ABMs against each of CD19, a component of a TCR complex, and CD2 or a TAA, (ii) three ABMs against one of CD19, a component of a TCR complex, and CD2 or a TAA, or (iii) four ABMs against one of CD19, a component of a TCR complex, and CD2 or a TAA. For example, a hexavalent ABM can include three ABMs against CD19, two ABMs against CD2 or a TAA and one ABM against a component of a TCR complex. As another example, a hexavalent ABM can include three ABMs against CD19, two ABMs against a component of a TCR complex and one ABM against CD2 or a TAA. In some cases, a hexavalent TBM has two, three, our four CD19 ABMs. In some embodiments, a hexavalent TBM has three CD19 ABMs. In other embodiments, a hexavalent TBM has four CD19 ABMs.

### 7.2.5. TCR ABMs

[0546] The MBMs of the disclosure contain an ABM that specifically binds to CD19 and an ABM2 which is specific for a different antigen. In the BBMs, Type 1 TBMs and Type 2 TBMs of the disclosure, ABM2 can bind to a component of a TCR complex. The TCR is a disulfide-linked membrane-anchored heterodimeric protein normally consisting of the highly variable alpha (α) and beta (β) chains expressed as part of a complex with the invariant CD3 chain molecules. T cells expressing this receptor are referred to as α:β (or αβ) T cells, though a minority of T cells express an alternate receptor, formed by variable gamma (γ) and delta (δ) chains, referred as γδ T cells.

[0547] In an embodiment, MBMs contain an ABM that specifically binds to CD3.

### 7.2.5.1. CD3 ABMs

[0548] The MBMs can contain an ABM that specifically binds to CD3. The term “CD3” refers to the cluster of differentiation 3 co-receptor (or co-receptor complex, or polypeptide chain of the co-receptor complex) of the T cell receptor. The amino acid sequence of the polypeptide chains of human CD3 are provided in NCBI Accession P04234, P07766 and P09693. CD3 proteins can also include variants. CD3 proteins can also include fragments. CD3 proteins also include post-translational modifications of the CD3 amino acid sequences. Post-translational modifications include, but are not limited to, N- and O-linked glycosylation.

[0549] In some embodiments, a MBM can comprise an ABM which is an anti-CD3 antibody (e.g., as described in US 2016/0355600, WO 2014/110601, WO 2014/145806, or WO 2020/052692) or an antigen-binding domain thereof. Exemplary anti-CD3 VH, VL, and scFV sequences that can be used in a MBM are provided in Table 9A. Further exemplary anti-CD3 VH, VL, and scFv sequences that can be used in a MBM are provided in WO 2019/104075, WO 2019/195535, and WO 2020/052692, the contents of which are incorporated herein by reference in their entireties.

TABLE 9A
CD3 Binders-Variable domain sequences

| | | | SEQ |
|---|---|---|---|
| Binding | | | ID |
| Domain | Chain | Sequence | NO: |
| CD3hi | VH | EVQLVESGGGLVQPGGSLKLSCAASGFTFNTYAMNWVRQASGKGL | 1279 |
| | | EWVGRIRSKYNNYATYYADSVKDRFTISRDDSKSTLYLQMNSLKTE | |
| | | DTAVYYCVRHGNFGNSYVSWFAYWGQGTLVTVSS | |
| | VL | QAVVTQEPSLTVSPGGTVTLTCRSSTGAVTTSNYANWVQQKPGQA | 1280 |
| | | PRGLIGGTNKRAPWTPARFSGSLLGDKAALTLSGAQPEDEAEYFCA | |
| | | LWYSNLWVFGGGTKLTVL | |
| | scFv | EVQLVESGGGLVQPGGSLKLSCAASGFTFNTYAMNWVRQASGKGL | 1281 |
| | | EWVGRIRSKYNNYATYYADSVKDRFTISRDDSKSTLYLQMNSLKTE | |
| | | DTAVYYCVRHGNFGNSYVSWFAYWGQGTLVTVSSGGGGSGGGG | |
| | | SGGGGSGGGGSQAVVTQEPSLTVSPGGTVTLTCRSSTGAVTTSNY | |
| | | ANWVQQKPGQAPRGLIGGTNKRAPWTPARFSGSLLGDKAALTLSG | |
| | | AQPEDEAEYFCALWYSNLWVFGGGTKLTVL | |
| CD3med | VH | EVQLVESGGGLVQPGGSLKLSCAASGFTFNTYAMNWVRQASGKGL | 1282 |
| | | EWVGRIRSKYNNYATYYADSVKDRFTISRDDSKNTAYLQMNSLKTE | |
| | | DTAVYYCVRHGNFGNSYVSWFAHWGQGTLVTVSS | |
| | VL | QAVVTQEPSLTVSPGGTVTLTCGSSTGAVTSSNYANWVQQKPGQA | 1283 |
| | | PRGLIGGTNKRAPWTPARFSGSLLGGKAALTLSGAQPEDEAEYYCA | |
| | | LWYSNLWVFGGGTKLTVL | |
| | scFv | EVQLVESGGGLVQPGGSLKLSCAASGFTFNTYAMNWVRQASGKGL | 1284 |
| | | EWVGRIRSKYNNYATYYADSVKDRFTISRDDSKNTAYLQMNSLKTE | |
| | | DTAVYYCVRHGNFGNSYVSWFAHWGQGTLVTVSSGGGGSGGGG | |
| | | SGGGGSGGGGSQAVVTQEPSLTVSPGGTVTLTCGSSTGAVTSSNY | |
| | | ANWVQQKPGQAPRGLIGGTNKRAPWTPARFSGSLLGGKAALTLSG | |
| | | AQPEDEAEYYCALWYSNLWVFGGGTKLTVL | |
| CD3lo | VH | EVQLVESGGGLVQPGGSLKLSCAASGFTFNTYAMNWVRQASGKGL | 1285 |
| | | EWVGRIRSKYNNYATYYADSVKDRFTISRDDSKSTAYLQMNSLKTE | |
| | | DTAVYYCVRHGNFGNSYVSWFAYWGQGTLVTVSS | |
| | VL | QAVVTQEPSLTVSPGGTVTLTCRSSTGAVTTSNYANWVQQKPGQA | 1280 |
| | | PRGLIGGTNKRAPWTPARFSGSLLGDKAALTLSGAQPEDEAEYFCA | |
| | | LWYSNLWVFGGGTKLTVL | |
| | scFv | EVQLVESGGGLVQPGGSLKLSCAASGFTFNTYAMNWVRQASGKGL | 1286 |
| | | EWVGRIRSKYNNYATYYADSVKDRFTISRDDSKSTAYLQMNSLKTE | |
| | | DTAVYYCVRHGNFGNSYVSWFAYWGQGTLVTVSSGGGGSGGGG | |
| | | SGGGGSGGGGSQAVVTQEPSLTVSPGGTVTLTCRSSTGAVTTSNY | |
| | | ANWVQQKPGQAPRGLIGGTNKRAPWTPARFSGSLLGDKAALTLSG | |
| | | AQPEDEAEYFCALWYSNLWVFGGGTKLTVL | |

[0550] CDR sequences for CD3hi, CD3med, and CD31o as defined by the Kabat numbering scheme (Kabat et al, 1991, Sequences of Proteins of Immunological Interest, 5^{th} Ed. Public Health Service, National Institutes of Health, Bethesda, Md) are provided in Table 9B.

TABLE 9B
CD3 Binders-CDR sequences according to Kabat numbering scheme

| Binding | | | SEQ ID | | SEQ ID | | SEQ ID |
|---|---|---|---|---|---|---|---|
| Domain | Chain | CDR1 | NO: | CDR2 | NO: | CDR3 | NO: |
| CD3hi | VH | TYAMN | 1287 | RIRSKYNNYATYYA | 1290 | HGNFGNSYVS | 1292 |
| | | | | DSVKD | | WFAY | |
| | VL | RSSTGAVTT | 1288 | GTNKRAP | 1291 | ALWYSNLWV | 1293 |
| | | SNYAN | | | | | |
| CD3med | VH | TYAMN | 1287 | RIRSKYNNYATYYA | 1290 | HGNFGNSYVS | 1294 |
| | | | | DSVKD | | WFAH | |
| | VL | GSSTGAVTS | 1289 | GTNKRAP | 1291 | ALWYSNLWV | 1293 |
| | | SNYAN | | | | | |
| CD3lo | VH | TYAMN | 1287 | RIRSKYNNYATYYA | 1290 | HGNFGNSYVS | 1292 |
| | | | | DSVKD | | WFAY | |
| | VL | RSSTGAVTT | 1288 | GTNKRAP | 1291 | ALWYSNLWV | 1293 |
| | | SNYAN | | | | | |

[0551] In some embodiments, a MBM can comprise a CD3 ABM which comprises the CDRs of any of CD3hi, CD3med, or CD31o as set forth in Table 9B.

[0552] In some embodiments, a MBM comprises a CD3 ABM which comprises the VH and VL sequences of CD3hi. In some embodiments, a MBM comprises a CD3 ABM which comprises the VH and VL sequences of CD3med. In some embodiments, a MBM comprises a CD3 ABM which comprises the VH and VL sequences of CD31o.

[0553] In addition to the CDR sets described in Table 9B (i.e., the set of six CDRs for each of CD3hi, CD3med, and CD3lo), the present disclosure provides variant CDR sets. In one embodiment, a set of 6 CDRs can have 1, 2, 3, 4 or 5 amino acid changes from a CDR set described in Table 9B, as long as the CD3 ABM is still able to bind to the target antigen, as measured by at least one of a Biacore, surface plasmon resonance (SPR) and/or BLI (biolayer interferometry, e.g., Octet assay) assay.

[0554] In addition to the variable heavy and variable light domains disclosed in Table 9A that form an ABM to CD3, the present disclosure provides variant VH and VL domains. In one embodiment, the variant VH and VL domains each can have from 1, 2, 3, 4, 5, 6, 7, 8, 9 or 10 amino acid changes from the VH and VL domain set forth in Table 9A, as long as the ABM is still able to bind to the target antigen, as measured at least one of a Biacore, surface plasmon resonance (SPR) and/or BLI (biolayer interferometry, e.g., Octet assay) assay. In another embodiment, the variant VH and VL are at least 90, 95, 97, 98 or 99% identical to the respective VH or VL disclosed in Table 9A, as long as the ABM is still able to bind to the target antigen, as measured by at least one of a Biacore, surface plasmon resonance (SPR) and/or BLI (biolayer interferometry, e.g., Octet assay) assay.

[0555] VH and VL sequences (amino acid sequences and the nucleotide sequences encoding the amino acid sequences) can be “mixed and matched” to create other CD3 ABMs. Such “mixed and matched” CD3 ABMs can be tested using binding assays known in the art (e.g., FACS assays). When chains are mixed and matched, a VH sequence from a particular VH/VL pairing should be replaced with a structurally similar VH sequence. A VL sequence from a particular VH/VL pairing should be replaced with a structurally similar VL sequence.

[0556] In some embodiments, the antigen-binding domain that specifically binds to human CD3 is non-immunoglobulin based and is instead derived from a non-antibody scaffold protein, for example one of the non-antibody scaffold proteins described in Section 7.2.1.2. In an embodiment, the antigen-binding domain that specifically binds to human CD3 comprises Affilin-144160, which is described in WO 2017/013136. Affilin-144160 has the following amino acid sequence:

(SEQ ID NO: 1295)
MQIFVKTLTGKTITLEVEPSDTIENVKAKIQDKEGIPPDQQWLWFAGKQ
LEDGRTLSDYNIQKESTLKLWLVDKAAMQIFVYTRTGKTITLEVEPSDT
IENVKAKIQDKEGIPPDQQRLIWAGKQLEDGRTLSDYNIALESGLHLVL
RLRAA

### 7.2.5.2. TCR-α/β ABMs

[0557] The MBMs can contain an ABM that specifically binds to the TCR-α chain, the TCR-β chain, or the TCR-αβ dimer. Exemplary anti-TCR-α/β antibodies are known (see, e.g., US 2012/0034221; Borst et al., 1990, Hum Immunol. 29(3):175-88 (describing antibody BMA031)). The VH, VL, and Kabat CDR sequences of antibody BMA031 are provided in Table 10.

TABLE 10
BMA031 sequences

| | | SEQ |
|---|---|---|
| | | ID |
| Domain | Sequence | NO: |
| BMA031 | KASGYKFTSYVMH | 1296 |
| CDR-H1 | | |
| BMA031 | YINPYNDVTKYNEKFK | 1297 |
| CDR-H2 | | |
| BMA031 | GSYYDYDGFVY | 1298 |
| CDR-H3 | | |
| BMA031 | SATSSVSYMH | 1299 |
| CDR-L1 | | |
| BMA031 | DTSKLAS | 1300 |
| CDR-L2 | | |
| BMA031 | QQWSSNPLT | 1301 |
| CDR-L3 | | |
| BMA031 | EVQLQQSGPELVKPGASVKMSCKASGYKFTSYVMHWVKQKPGQGLE | 1302 |
| VH | WIGYINPYNDVTKYNEKFKGKATLTSDKSSSTAYMELSSLTSEDSAVH | |
| | YCARGSYYDYDGFVYWGQGTLVTVSA | |
| BMA031 | QIVLTQSPAIMSASPGEKVTMTCSATSSVSYMHWYQQKSGTSPKRWI | 1303 |
| VL | YDTSKLASGVPARFSGSGSGTSYSLTISSMEAEDAATYYCQQWSSNP | |
| | LTFGAGTKLELK | |

[0558] In an embodiment, a TCR ABM can comprise the CDR sequences of antibody BMA031. In other embodiments, a TCR ABM can comprise the VH and VL sequences of antibody BMA031.

### 7.2.5.3. TCR-γ/δ ABMs

[0559] The MBMs can contain an ABM that specifically binds to the TCR-γ chain, the TCR-δ chain, or the TCR-γδ dimer. Exemplary anti-TCR-γ/δ antibodies are known (see, e.g., U.S. Pat. No. 5,980,892 (describing δTCS1, produced by the hybridoma deposited with the ATCC as accession number HE 9578)).

### 7.2.6. CD2 ABMs

### 7.2.6.1. Immunoglobulin-Based CD2 ABMs

[0560] A Type 1 TBM can comprise an ABM which is an anti-CD2 antibody or an antigen-binding domain thereof. Exemplary anti-CD2 antibodies are known (see, e.g., U.S. Pat. No. 6,849,258, CN102827281A, US 2003/0139579 A1, and U.S. Pat. No. 5,795,572). Table 11 provides exemplary CDR, VH, and VL sequences that can be included in ant-CD2 antibodies or antigen-binding fragments thereof, for use in MBMs of the disclosure.

TABLE 11
Immunoglobulin Based CD2 Binders

| | | | SEQ ID |
|---|---|---|---|
| Name | Domain | Sequence | NO: |
| CD2-1 | CDR-H1 | EYYMY (Rat Lo-CD2a = BTI-322 from FIG. 33 of USP | 1304 |
| | | 6,849,258) | |
| CD2-1 | CDR-H2 | RIDPEDGSIDYVEKFKK (Rat Lo-CD2a = BTI-322 from FIG. | 1305 |
| | | 33 of USP 6,849,258) | |
| CD2-1 | CDR-H3 | GKFNYRFAY (Rat Lo-CD2a = BTI-322 from FIG. 33 of USP | 1306 |
| | | 6,849,258) | |
| CD2-1 | CDR-L1 | RSSQSLLHSSGNTYLN (Rat Lo-CD2a = BTI-322 from FIG. | 1307 |
| | | 31 of USP 6,849,258) | |
| CD2-1 | CDR-L2 | LVSKLES (Rat Lo-CD2a = BTI-322 from FIG. 31 of USP | 1308 |
| | | 6,849,258) | |
| CD2-1 | CDR-L3 | QFTHYPYT (Rat Lo-CD2a = BTI-322 from FIG. 31 of USP | 1309 |
| | | 6,849,258) | |
| CD2-1 | VH | EVQLQQSGPELQRPGASVKLSCKASGYIFTEYYMYWVKQR | 1225 |
| | | PKQGLELVGRIDPEDGSIDYVEKFKKKATLTADTSSNTAYM | |
| | | QLSSLTSEDTATYFCARGKFNYRFAYWGQGTLVTVSS | |
| | | (SEQ ID NO: 100 of USP 6,849,258) | |
| CD2-1 | VL | DVVLTQTPPTLLATIGQSVSISCRSSQSLLHSSGNTYLNWLL | 1216 |
| | | QRTGQSPQPLIYLVSKLESGVPNRFSGSGSGTDFTLKISGV | |
| | | EAEDLGVYYCMQFTHYPYTFGAGTKLELK (Rat Lo-CD2a Vk | |
| | | from SEQ ID NO: 92, without signal sequence as shown | |
| | | in FIG. 31 of USP 6,849,258) | |
| hu1CD2-1 | VH | QVQLVQSGAEVKKPGASVKVSCKASGYTFTEYYMYWVRQ | 1226 |
| | | APGQGLELMGRIDPEDGSIDYVEKFKKKVTLTADTSSSTAY | |
| | | MELSSLTSDDTAVYYCARGKFNYRFAYWGQGTLVTVSS | |
| | | (SEQ ID NO: 101 of USP 6,849,258) | |
| | VL | DVVMTQSPPSLLVTLGQPASISCRSSQSLLHSSGNTYLNWL | 1221 |
| | | LQRPGQSPQPLIYLVSKLESGVPDRFSGSGSGTDFTLKISG | |
| | | VEAEDVGVYYCMQFTHYPYTFGQGTKLEIK (SEQ ID NO: 96 | |
| | | of USP 6,849,258) | |
| hu2CD2-1 | VH | EVQLQQSGPELQRPGASVKLSCKASGYIFTEYYMYWVKQR | 1225 |
| | | PKQGLELVGRIDPEDGSIDYVEKFKKKATLTADTSSNTAYM | |
| | | QLSSLTSEDTATYFCARGKFNYRFAYWGQGTLVTVSS (Vh | |
| | | of MEDI-507; SEQ ID NO: 105 of USP 6,849,258) | |
| | VL | DVVMTQSPPSLLVTLGQPASISCRSSQSLLHSSGNTYLNWL | 1221 |
| | | LQRPGQSPQPLIYLVSKLESGVPDRFSGSGSGTDFTLKISG | |
| | | VEAEDVGVYYCMQFTHYPYTFGQGTKLEIK (SEQ ID NO: 96 | |
| | | of USP 6,849,258)(same as hu1CD2-1) | |

[0561] In some embodiments, a 002 ABM comprises the CDR sequences of 002-1 (SEQ ID NOS:). In some embodiments, a 002 ABM comprises the heavy and light chain variable sequences of 002-1 (SEQ ID NOS; and, respectively). In some embodiments, a 002 ABM comprises the heavy and light chain variable sequences of hu1CD2-1 (SEQ ID NOS; and, respectively). In some embodiments, a 002 ABM comprises the heavy and light chain variable sequences of hu2CD2-1 (SEQ ID NOS; and, respectively).

[0562] In other embodiments, a 002 ABM can comprise the CDR sequences of antibody 901 produced by the hybridoma deposited with the Chinese Culture Collection Committee General Microbiology Center on May 16, 2012 with accession no. CGMCC 6132, and which is described in CN102827281A. In other embodiments, a CD2 ABM can comprise the CDR sequences of antibody LO-CD2b produced by the hybridoma deposited with the American Type Culture Collection on Jun. 22, 1999 with accession no. PTA-802, and which is described in US 2003/0139579 A1. In yet other embodiments, a CD2 ABM can comprise the CDR sequences of the CD2 SFv-Ig produced by expression of the construct cloned in the recombinant E. coli deposited with the ATCC on Apr. 9, 1993 with accession no. 69277, and which is described in U.S. Pat. No. 5,795,572.

[0563] In other embodiments, a CD2 ABM can comprise the VH and VL sequences of antibody 9D1. In other embodiments, a CD2 ABM can comprise the VH and VL sequences of antibody LO-CD2b. In yet other embodiments, a CD2 ABM can comprise the VH and VL sequences of the CD2 SFv-Ig produced by expression of the construct cloned in the recombinant E. coli having ATCC accession no. 69277.

### 7.2.6.2. CD58-Based CD2 ABMs

[0564] In certain aspects the present disclosure provides a Type 1 TBM comprising a CD2 ABM which is a ligand. The CD2 ABM specifically binds to human CD2, whose natural ligand is CD58, also known as LFA-3. CD58/LFA-3 proteins are glycoproteins that are expressed on the surfaces of a variety of cell types (Dustin et al., 1991, Annu. Rev. Immunol. 9:27) and play roles in mediating T-cell interactions with APCs in both antigen-dependent and antigen-independent manners (Wallner et al., 1987, J. Exp. Med. 166:923). Accordingly, in certain aspects, the CD2 ABM is a CD58 moiety. As used herein, a CD58 moiety comprises an amino acid sequence comprising at least 70% sequence identity to a CD2-binding portion of CD58, e.g., at least 70%, 71%, 72%, 73%, 74%, 75%, 76%, 77%, 78%, 79%, 80%, 81%, 82%, 83%, 84%, 85%, 86%, 87%, 88%, 89%, 90%, 91%, 92%, 93%, 94%, 95%, 96%, 97%, 98%, or 99% identity to a CD2-binding portion of CD58. The sequence of human CD58 has the Uniprot identifier P19256 (www.uniprot.org/uniprot/P19256). It has been established that CD58 fragments containing amino acid residues 30-123 of full length CD58 (i.e., the sequence designated as CD58-6 in Table 12 below) are sufficient for binding to CD2. Wang et al., 1999, Cell 97:791-803. Accordingly, in certain aspects, a CD58 moiety comprises an amino acid sequence comprising at least 70% sequence identity to amino acids 30-123 of CD58, e.g., at least 70%, 71%, 72%, 73%, 74%, 75%, 76%, 77%, 78%, 79%, 80%, 81%, 82%, 83%, 84%, 85%, 86%, 87%, 88%, 89%, 90%, 91%, 92%, 93%, 94%, 95%, 96%, 97%, 98%, or 99% identity to the amino acid sequence designated CD58-6.

[0565] The interactions between CD58 and CD2 have been mapped through x-ray crystallography and molecular modeling. The substitution of residues E25, K29, K30, K32, D33, K34, E37, D84 and K87 (with numbering referring to the in the mature polypeptide) reduces binding to 002. Ikemizu et al., 1999, Proc. Natl. Acad. Sci. USA 96:4289-94. Accordingly, in some embodiments the CD58 moiety retains the wild type residues at E25, K29, K30, K32, D33, K34, E37, D84 and K87.

[0566] In contrast, the following substitutions (with numbering referring to the full length polypeptide) did not impact binding to CD2: F29S; V37K; V49Q; V86K; T113S; and L121G. Accordingly, a CD58 moiety can include one, two, three, four, five or all six of the foregoing substitutions.

[0567] In some embodiments, the CD58 moiety is engineered to include a pair of cysteine substitutions that upon recombinant expression create a disulfide bridge. Exemplary amino acid pairs that can be substituted with cysteines in order to form a disulfide bridge upon expression (with numbering referring to the full length polypeptide) are (a) a V45C substitution and a M105C substitution; (b) a V54C substitution and a G88C substitution; (c) a V45C substitution and a M 114C substitution; and (d) a W56C substitution and a L90C substitution.

[0568] Exemplary 0058 moieties are provided in Table 12 below:

TABLE 12
CD58 sequences

| Name | Description | Sequence | SEQ ID NO: |
|---|---|---|---|
| CD58-1 | Full length CD58, | MVAGSDAGRALGVLSVVCLLHCFGFISCFSQQIYGVVY | 1310 |
| | including signal | GNVTFHVPSNVPLKEVLWKKQKDKVAELENSEFRAFS | |
| | sequence and full | SFKNRVYLDTVSGSLTIYNLTSSDEDEYEMESPNITDTM | |
| | intracellular domain | KFFLYVLESLPSPTLTCALTNGSIEVQCMIPEHYNSHRG | |
| | (P19256) | LIMYSWDCPMEQCKRNSTSIYFKMENDLPQKIQCTLSN | |
| | | PLFNTTSSIILTTCIPSSGHSRHRYALIPIPLAVITTCIVLY | |
| | | MNGILKCDRKPDRTNSN | |
| CD58-2 | Full length CD58, | MVAGSDAGRALGVLSVVCLLHCFGFISCFSQQIYGVVY | 1311 |
| | including signal | GNVTFHVPSNVPLKEVLWKKQKDKVAELENSEFRAFS | |
| | sequence and but | SFKNRVYLDTVSGSLTIYNLTSSDEDEYEMESPNITDTM | |
| | no intracellular | KFFLYVLESLPSPTLTCALTNGSIEVQCMIPEHYNSHRG | |
| | domain (P19256-2) | LIMYSWDCPMEQCKRNSTSIYFKMENDLPQKIQCTLSN | |
| | | PLFNTTSSIILTTCIPSSGHSRHRYALIPIPLAVITTCIVLY | |
| | | MNVL | |
| CD58-3 | Full length CD58, | MVAGSDAGRALGVLSVVCLLHCFGFISCFSQQIYGVVY | 1312 |
| | including signal | GNVTFHVPSNVPLKEVLWKKQKDKVAELENSEFRAFS | |
| | sequence and | SFKNRVYLDTVSGSLTIYNLTSSDEDEYEMESPNITDTM | |
| | variant intracellular | KFFLYVLESLPSPTLTCALTNGSIEVQCMIPEHYNSHRG | |
| | domain (P19256-3) | LIMYSWDCPMEQCKRNSTSIYFKMENDLPQKIQCTLSN | |
| | | PLFNTTSSIILTTCIPSSGHSRHRYALIPIPLAVITTCIVLY | |
| | | MNGILKCDRKPDRTK | |
| CD58-4 | Extracellular domain | FSQQIYGVVYGNVTFHVPSNVPLKEVLWKKQKDKVAE | 1313 |
| | of CD58, | LENSEFRAFSSFKNRVYLDTVSGSLTIYNLTSSDEDEYE | |
| | corresponding to | MESPNITDTMKFFLYVLESLPSPTLTCALTNGSIEVQCM | |
| | amino acids 29-215 | IPEHYNSHRGLIMYSWDCPMEQCKRNSTSIYFKMENDL | |
| | of CD58 (WT) | PQKIQCTLSNPLFNTTSSIILTTCIPSSGHSRHR | |
| CD58-5 | Extracellular domain | BSQQIYGVJYGNVTFHVPSNOPLKEVLWKKQKDK | 1278 |
| | of CD58, | VAELENSEFRAFSSFKNRVYLDTUSGSLTIYNLTS | |
| | corresponding to | SDEDEYEMESPNITDXMKFFLYVZESLPSPTLTCA | |
| | amino acids 29-215 | LTNGSIEVQCMIPEHYNSHRGLIMYSWDCPMEQC | |
| | of CD58 (with | KRNSTSIYFKMENDLPQKIQCTLSNPLFNTTSSIILT | |
| | permitted | TCIPSSGHSRHR | |
| | substitutions) | B = F or S | |
| | | J = V or K | |
| | | O = V or Q | |
| | | U = V or K | |
| | | X = T or S | |
| | | Z = L or G | |
| CD58-6 | Amino acids 30-123 | SQQIYGWYGNVTFHVPSNVPLKEVLWKKQKDKVAEL | 1315 |
| | (WT) | ENSEFRAFSSFKNRVYLDTVSGSLTIYNLTSSDEDEYE | |
| | Ig-V like domain | MESPNITDTMKFFLYVLES | |
| CD58-7 | Amino acids 30-123 | SQQIYGVJYGNVTFHVPSNOPLKEVLWKKQKDKVAEL | 1316 |
| | (with permitted | ENSEFRAFSSFKNRVYLDTVSGSLTIYNLTSSDEDEYE | |
| | substitutions) | MESPNITDTMKFFLYVLES | |
| | Ig-V like domain | J = V or K | |
| | | O = V or Q | |
| CD58-8 | Amino acids 30-123 | SQQIYGVVYGNVTFHCPSNVPLKEVLWKKQKDKVAEL | 1317 |
| | (V45C_M105C) | ENSEFRAFSSFKNRVYLDTVSGSLTIYNLTSSDEDEYE | |
| | Ig-V like domain | CESPNITDTMKFFLYVLES | |
| CD58-9 | Amino acids 30-123 | SQQIYGVVYGNVTFHVPSNVPLKECLWKKQKDKVAEL | 1318 |
| | (V54C_G88C) | ENSEFRAFSSFKNRVYLDTVSCSLTIYNLTSSDEDEYE | |
| | Ig-V like domain | MESPNITDTMKFFLYVLES | |
| CD58-10 | Amino acids 30-123 | SQQIYGVVYGNVTFHCPSNVPLKEVLWKKQKDKVAEL | 1319 |
| | (V45C_M114C) | ENSEFRAFSSFKNRVYLDTVSGSLTIYNLTSSDEDEYE | |
| | Ig-V like domain | MESPNITDTCKFFLYVLES | |
| CD58-11 | Amino acids 30-123 | SQQIYGWVYGNVTFHVPSNVPLKEVLCKKQKDKVAELE | 1320 |
| | (W56C_L90C) | NSEFRAFSSFKNRVYLDTVSGSCTIYNLTSSDEDEYEM | |
| | Ig-V like domain | ESPNITDTMKFFLYVLES | |

### 7.2.6.3. CD48-Based CD2 ABMs

[0569] In certain aspects the present disclosure provides a MBM comprising a CD2 ABM which is CD48 moiety. As used herein, a CD48 moiety comprises an amino acid sequence comprising at least 70% sequence identity to a CD2-binding portion of CD48, e.g., at least 70%, 71%, 72%, 73%, 74%, 75%, 76%, 77%, 78%, 79%, 80%, 81%, 82%, 83%, 84%, 85%, 86%, 87%, 88%, 89%, 90%, 91%, 92%, 93%, 94%, 95%, 96%, 97%, 98%, or 99% identity to a CD2-binding portion of CD48. The sequence of human CD48 has the Uniprot identifier P09326 (www.uniprot.org/uniprot/P09326), which includes a signal peptide (amino acids 1-26) and a GPI anchor (amino acids 221-243). In certain aspects, a CD48 moiety comprises an amino acid sequence comprising at least 70% sequence identity (e.g., at least 70%, 71%, 72%, 73%, 74%, 75%, 76%, 77%, 78%, 79%, 80%, 81%, 82%, 83%, 84%, 85%, 86%, 87%, 88%, 89%, 90%, 91%, 92%, 93%, 94%, 95%, 96%, 97%, 98%, or 99% identity) to the amino acid sequence consisting of amino acids 27-220 of Uniprot identifier P09326. Human CD48 has an Ig-like C2-type I domain (amino acids 29-127 of Uniprot identifier P09326) and a Ig-like C2 type 2 domain (amino acids 132-212 of Uniprot identifier P09326). Accordingly, in some embodiments, a CD48 moiety comprises an amino acid sequence comprising at least 70% sequence identity (e.g., at least 70%, 71%, 72%, 73%, 74%, 75%, 76%, 77%, 78%, 79%, 80%, 81%, 82%, 83%, 84%, 85%, 86%, 87%, 88%, 89%, 90%, 91%, 92%, 93%, 94%, 95%, 96%, 97%, 98%, or 99% identity) to the amino acid sequence consisting of amino acids 29-212 of Uniprot identifier P09326, to the C2-type I domain (amino acids 29-127 of Uniprot identifier P09326) and/or to the Ig-like C2 type 2 domain (amino acids 132-212 of Uniprot identifier P09326). A CD48 moiety can in some embodiments comprise one or more natural variants relative to the sequence of Uniprot identifier P09326. For example, a CD48 moiety can include a E102Q substitution. As another example, a CD48 moiety can comprise an amino acid sequence corresponding to a CD-48 isoform or a CD2 binding portion thereof, e.g., the isoform having Uniprot identifier P09326-2 or a CD2 binding portion thereof.

### 7.2.7. Tumor-Associated Antigen ABMs

[0570] The Type 2 TBMs can comprise an ABM that binds specifically to a tumor-associated antigen (TAA). In some embodiments, the TAA is a human TAA. The antigen may or may not be present on normal cells. In certain embodiments, the TAA is preferentially expressed or upregulated on tumor cells as compared to normal cells. In other embodiments, the TAA is a lineage marker.

[0571] In certain embodiments, the TAA is expressed or upregulated on cancerous B cells as compared to normal B cells. In other embodiments, the TAA is a B cell lineage marker.

[0572] It is anticipated that any type of B cell malignancy can be targeted by the MBMs of the disclosure. Exemplary types of B cell malignancies that can be targeted include Hodgkin's lymphomas, non-Hodgkin's lymphomas (NHLs), and multiple myeloma. Examples of NHLs include diffuse large B-cell lymphoma (DLBCL), follicular lymphoma, chronic lymphocytic leukemia (CLL)/small lymphocytic lymphoma (SLL), mantle cell lymphoma (MCL), marginal zone lymphomas, Burkitt lymphoma, lymphoplasmacytic lymphoma (Waldenstrom macroglobulinemia), hairy cell leukemia, splenic marginal zone B-cell lymphoma, extranodal marginal zone B-cell lymphoma of MALT, nodal marginal zone B-cell lymphoma, and primary effusion lymphoma.

[0573] Examples of TAAs that can be targeted by CD19-binding MBMs (e.g., TBMs) include BCMA, CD20, CD22, CD123, CD33, CLL1, CD138 (also known as Syndecan-1, SDC1), CS1, CD38, CD133, FLT3, CD52, TNFRSF13C (TNF Receptor Superfamily Member 13C, also referred to in the art as BAFFR: B-Cell-Activating Factor Receptor), TNFRSF13B (TNF Receptor Superfamily Member 13B, also referred to in the art as TACI: Transmembrane Activator And CAML Interactor), CXCR4 (C—X—C Motif Chemokine Receptor 4), PD-L1 (programmed death-ligand 1), LY9 (lymphocyte antigen 9, also referred to in the art as CD229), CD200, FCGR2B (Fc fragment of IgG receptor IIb, also referred to in the art as CD32b), CD21, CD23, CD24, CD40L, CD72, CD79a, and CD79b. In some embodiments, the TAA is BCMA. In some embodiments, the TAA is CD20. In some embodiments, the TAA is CD22. In some embodiments, the TAA is CD123. In some embodiments, the TAA is CD33. In some embodiments, the TAA is CLL1. In some embodiments, the TAA is CD138. In some embodiments, the TAA is CS1. In some embodiments, the TAA is CD38. In some embodiments, the TAA is CD133. In some embodiments, the TAA is FLT3. In some embodiments, the TAA is CD52. In some embodiments, the TAA is TNFRSF13C. In some embodiments, the TAA is TNFRSF13B. In some embodiments, the TAA is CXCR4. In some embodiments, the TAA is PD-L1. In some embodiments, the TAA is LY9. In some embodiments, the TAA is CD200. In some embodiments, the TAA is CD21. In some embodiments, the TAA is CD23. In some embodiments, the TAA is CD24. In some embodiments, the TAA is CD40L. In some embodiments, the TAA is CD72. In some embodiments, the TAA is CD79a. In some embodiments, the TAA is CD79b.

[0574] A TAA-binding ABM can comprise, for example, an anti-TAA antibody or an antigen-binding fragment thereof. The anti-TAA antibody or antigen-binding fragment can comprise, for example, the CDR sequences of an antibody set forth in Table 15. In some embodiments, the anti-TAA antibody or antigen-binding domain thereof has the heavy and light chain variable region sequences of an antibody set forth in Table 15.

TABLE 15
Exemplary Anti-Tumor-Associated Antigen Antibodies

| Target | ExampIes of Antibody Name and/or Reference(s) and/or Source |
|---|---|
| CD123 | Any CD123 antibody described in U.S. Pat. No. 8,852,551, EP2426148, WO |
| | 2014/138819, WO 2016/028896, or WO 2014/130635 |
| BCMA | Any BCMA antibody described in WO2012163805, WO200112812, or |
| | WO2003062401. |
| CD20 | Rituximab, Ofatumumab, Ocrelizumab, Veltuzumab, or GA101 |
| CD22 | Any CD22 antibody described in Haso et al., 2013, Blood, 121(7): 1165-1174, |
| | Wayne et al., 2010, Clin Cancer Res 16(6): 1894-1903, Kato et al., 2013, Leuk |
| | Res 37(1): 83-88, or Creative BioMart (creativebiomart.net): MOM-18047-S(P). |
| CD33 | Any CD33 antibody described in Bross et al., 2001, Clin Cancer Res 7(6): 1490- |
| | 1496 (Gemtuzumab Ozogamicin, hP67.6), Caron et al., 1992, Cancer Res |
| | 52(24): 6761-6767 (Lintuzumab, HuM195), Lapusan et al., 2012, Invest New |
| | Drugs 30(3): 1121-1131 (AVE9633), Aigner et al., 2013, Leukemia 27(5): 1107- |
| | 1115 (AMG330, CD33 BiTE), Dutour et al., 2012, Adv Hematol 2012: 683065, or |
| | Pizzitola et al., 2014, Leukemia doi: 10.1038/Lue.2014.62. |
| CD38 | Daratumumab (see, e.g., Groen et al., 2010, Blood 116(21): 1261-1262; MOR202 |
| | (see, e.g., U.S. Pat. No. 8,263,746); or any CD38 antibody described in U.S. Pat. |
| | No. 8,362,211. |
| CLL-1 | PE-CLL1-hu Cat# 353604 (BioLegend); PE-CLL1 (CLEC12A) Cat# 562566 |
| | (BD); Any CLL-1 antibody described in WO 2014/051433 A1, US 2016/0368994 |
| | A1, US 2013/0295118 A1, U.S. Pat. No. 8,536,310 B2, Lu et al., 2014, |
| | Angewandte Chemie International Edition 53(37): 9841-9845, or Leong et al., |
| | 2017, Blood 129(5): 609-618 |
| CS1 | Elotuzumab (BMS), see e.g., Tai et al., 2008, Blood 112(4): 1329-37; Tai et al., |
| | 2007, Blood. 110(5): 1656-63. |
| FLT3 | Any FLT3 antibody described in WO 2011/076922, U.S. Pat. No. 5777084, |
| | EP0754230, or US 2009/0297529. |
| CD133 | Any CD133 antibody described in U.S. Pat No. 9,624,303, WO 2016/154623, or |
| | WO 2011/089211; 5E3 (ThermoFisher); MAB11331 (R&D Systems); MAB4310 |
| | (Millipore Sigma) |
| CD138 | Any CD138 antibody described in WO/2009/080829, WO/2017/014679, or U.S. |
| | Pat. No. 9,289,509; nBT062 (Biotest AG); MI15, B-A38, SP152, DL-101 |
| | (ThermoFisher) |
| CD52 | alemtuzumab (Genzyme); ANT1034 (see, Holgate et al., 2015, PLOS ONE |
| | 10(9): e0138123; any CD52 antibody described in WO/2010/132659; any CD52 |
| | antibody described in U.S. Pat No. 9,708,407; any CD52 antibody described in |
| | WO/2010/132659 |
| TNFRSF13C | Any TNFRSF13C antibody described in WO 2010/007082, U.S. Pat. No. |
| | 9,382,326 |
| TNFRSF13B | Any TNFRSF13B antibody described in WO 2004/011611; LS-C89973 (Lifespan |
| | Biosciences, Inc.) M02952-1 (Boster Biological Technology); MAB1041, |
| | MAB1741, and MAB174 (R&D Systems) |
| CXCR4 | Any CXCR4 antibody described in U.S. Pat. Nos. 7,138,496, 8,329,178, |
| | 8,450,464, 9,249,223, or 9,260,527 |
| PD-L1 | Any PD-L1 antibody described in US 2015/0203580, US 2017/0058033, US |
| | 2017/0204184, U.S. Pat. No. 8,741,295, U.S. Pat. No. 9,789,183, or U.S. Pat. No. |
| | 9,637,546 |
| LY9 | HLy9.25 (e.g., Lifespan Biosciences, Inc. cat. no. LS-C112605); MAB1898 (R&D |
| | Systems) |
| CD200 | Any CD200 antibody described in U.S. Pat. No. 7,887,798; ab23552 (Abcam); |
| | Ox104 (ThermoFisher) |
| FCGR2B | Any FCGR2B antibody described in U.S. Pat No. 8,802,089 or WO 2017/103895; |
| | ab45143 (Abcam); AT130-2 (ThermoFisher); 2E10 (Millipore Sigma) |
| CD21 | ab75985 (Abcam); ab9492 (Abcam); 2G9 (ThermoFisher); HB5 (ThermoFisher); |
| | MAB4909 (R&D Systems) |
| CD23 | Any CD23 antibody described in U.S. Pat. No. 7,008,623 or U.S. Pat. No. |
| | 6,011,138; lumiliximab (Biogen); ab16702 (Abcam); SP23 (ThermoFisher) |
| CD24 | Any CD24 antibody described in U.S. Pat. No. 8,614,301; SN3 (ThermoFisher); |
| | SN3b (ThermoFisher); 2Q1282 (Santa Cruz Biotechnology); 3H1143 (Santa |
| | Cruz Biotechnology); ALB9 (Santa Cruz Biotechnology); MAB5248 (R&D |
| | Systems) |
| CD40L | Any CD40L antibody described in U.S. Pat. No. 9,228,018 or US 2003/0099642; |
| | 24-31 (Biolegend); ab52750 (Abcam); ab47204 (Abcam); CDP7657 (UCB |
| | Pharma); 5c8 (Biogen) |
| CD72 | 3F3 (Biolegend); Bu40 (ThermoFisher); H-7 (Santa Cruz Biotechnology); H-96 |
| | (Santa Cruz Biotechnology); G-5 (Santa Cruz Biotechnology); ab92509 (Abcam) |
| CD79a | ab62650 (Abcam); ab79414 (Abcam); MAB69201 (R&D Systems); HM57 (Bio- |
| | Rad) |
| CD79b | Any CD79b antibody described in WO 2014/011521; ab130422 (Abcam); |
| | ab134147 (Abcam); polatuzumab (Genentech) |

[0575] In certain embodiments, the TAA is selected from BCMA and CD20. In some embodiments, the TAA is BCMA. “BCMA” refers to B-cell maturation antigen. BCMA (also known as TNFRSF17, BCM or CD269) is a member of the tumor necrosis receptor (TNFR) family and is predominantly expressed on terminally differentiated B cells, e.g., memory B cells and plasma cells. Its ligands include B-cell activating factor (BAFF) and a proliferation-inducing ligand (APRIL). The protein BCMA is encoded by the gene TNFRSF17. Exemplary BCMA sequences are available at the Uniprot database under accession number Q02223.

[0576] In certain aspects, a Type 2 TBM comprises an ABM3 that specifically binds to BCMA, for example, an anti-BCMA antibody or an antigen-binding domain thereof. The anti-BCMA antibody or antigen-binding domain thereof can comprise, for example, CDR, VH, VL, or scFV sequences set forth in Tables 11A-11G of WO 2019/195535, the contents of which are incorporated herein by reference in their entireties.

### 7.2.8. Nucleic Acids and Host Cells

[0577] The CD19 binding molecules described herein can be encoded by a single nucleic acid or, alternatively, encoded by a plurality of (e.g., two, three, four or more) nucleic acids.

[0578] A single nucleic acid can encode a CD19 binding molecule that comprises a single polypeptide chain, a CD19 binding molecule that comprises two or more polypeptide chains, or a portion of a CD19 binding molecule that comprises more than two polypeptide chains (for example, a single nucleic acid can encode two polypeptide chains of a CD19 binding molecule comprising three, four or more polypeptide chains, or three polypeptide chains of a CD19 binding molecule comprising four or more polypeptide chains). For separate control of expression, the open reading frames encoding two or more polypeptide chains can be under the control of separate transcriptional regulatory elements (e.g., promoters and/or enhancers). The open reading frames encoding two or more polypeptides can also be controlled by the same transcriptional regulatory elements, and separated by internal ribosome entry site (IRES) sequences allowing for translation into separate polypeptides.

[0579] In some embodiments, a CD19 binding molecule comprising two or more polypeptide chains is encoded by two or more nucleic acids. The number of nucleic acids encoding a CD19 binding molecule can be equal to or less than the number of polypeptide chains in the CD19 binding molecule (for example, when more than one polypeptide chains are encoded by a single nucleic acid).

[0580] The nucleic acids can be DNA or RNA (e.g., mRNA).

[0581] Host cells can be genetically engineered to comprise one or more nucleic acids encoding a CD19 binding molecule. In one embodiment, the host cells are genetically engineered by using an expression cassette. The phrase “expression cassette,” refers to nucleotide sequences, which are capable of affecting expression of a gene in hosts compatible with such sequences. Such cassettes can include a promoter, an open reading frame with or without introns, and a termination signal. Additional factors necessary or helpful in effecting expression can also be used, such as, for example, an inducible promoter. The cell can be, but is not limited to, a eukaryotic cell, a bacterial cell, an insect cell, or a human cell. Suitable eukaryotic cells include, but are not limited to, Vero cells, HeLa cells, COS cells, CHO cells, HEK293 cells, BHK cells and MDCKII cells. Suitable insect cells include, but are not limited to, Sf9 cells.

### 7.3. CAR Molecules

[0582] In some aspects, the anti-CD19 agent used in the methods and combinations of the disclosure is a population of cells that expresses a chimeric antigen receptor (CAR) molecule that binds CD19. As used herein, the term “CAR molecule” encompasses both CARs that are contiguous polypeptides and CARs that are non-contiguous polypeptides. Typically the treatment with a CAR is by way of administration of a population of cells that express the CD19 CAR molecule.

[0583] In certain aspects, the CAR molecule comprises a chimeric fusion protein comprising an extracellular antigen binding domain, a transmembrane domain and an intracellular signaling domain comprising a functional signaling domain derived from a stimulatory molecule, and optionally includes one or more functional signaling domains derived from one or more costimulatory molecules. For example, the CAR molecule can comprise a chimeric fusion protein comprising an extracellular antigen binding domain, a transmembrane domain and an intracellular signaling domain comprising two functional signaling domains derived from one or more costimulatory molecule(s) and a functional signaling domain derived from a stimulatory molecule. Extracellular antigen binding domains, transmembrane domains and intracellular signaling domains are described in Sections 7.3.1, 7.3.2 and 7.3.3, respectively, and exemplary CAR sequences are set forth in Section 7.3.4.

[0584] In some instances, the transmembrane domain can be attached to the extracellular region of the CAR, e.g., the antigen binding domain of the CAR, via a hinge. Exemplary hinge sequences are described in Section 7.3.2.

[0585] The CAR can also comprise an optional leader sequence at the amino-terminus (N-ter) of the CAR fusion protein, which when present is typically located at the N-terminus of the extracellular antigen binding domain. The leader sequence can be cleaved from the antigen binding domain (e.g., a scFv) during cellular processing and localization of the CAR to the cellular membrane and accordingly a CAR composition administered the subject may lack the leader sequence. Leader sequences useful in the CAR molecules of the disclosure are described in Section 7.3.1.

[0586] Further aspects of the CAR molecules useful in the methods and combinations of the disclosure are described below.

### 7.3.1. CD19 Binding Domain and Optional Leader

[0587] The portion of a CAR comprising an antibody or antibody fragment thereof may exist in a variety of forms where the antigen binding domain is expressed as part of a contiguous polypeptide chain including, for example, a single domain antibody fragment (sdAb), a single chain antibody (scFv), a humanized antibody, or bispecific antibody (Harlow et al., 1999, In: Using Antibodies: A Laboratory Manual, Cold Spring Harbor Laboratory Press, NY; Harlow et al., 1989, In: Antibodies: A Laboratory Manual, Cold Spring Harbor, New York; Houston et al., 1988, Proc. Natl. Acad. Sci. USA 85:5879-5883; Bird et al., 1988, Science 242:423-426). In one aspect, the antigen binding domain of a CAR comprises an antibody fragment. In a further aspect, the CAR comprises an antibody fragment that comprises a scFv.

[0588] In one aspect, the portion of the CAR comprising the antigen binding domain comprises an antigen binding domain that targets CD19. In one aspect, the antigen binding domain targets human CD19. In one aspect, the antigen binding domain of the CAR has the same or a similar binding specificity as, or includes, the FMC63 scFv fragment described in Nicholson et al., 1997, Mol. Immun. 34 (16-17): 1157-1165. In one aspect, the portion of the CAR comprising the antigen binding domain comprises an antigen binding domain that targets a B-cell antigen, e.g., a human B-cell antigen. A CD19 antibody molecule can be, e.g., an antibody molecule (e.g., a humanized anti-CD19 antibody molecule) described in WO2014/153270, which is incorporated herein by reference in its entirety. WO2014/153270 also describes methods of assaying the binding and efficacy of various CART constructs.

[0589] In some embodiments, the CD19 CAR comprises an antigen binding domain derived from (e.g., comprises an amino acid sequence of) an anti-CD19 antibody (e.g., an anti-CD19 mono- or bispecific antibody) or a fragment or conjugate thereof. In one embodiment, the anti-CD19 antibody is a humanized antigen binding domain as described in WO2014/153270 (e.g., Table 1 of WO2014/153270) incorporated herein by reference, or a conjugate thereof. Other exemplary anti-CD19 antibodies or fragments or conjugates thereof, include but are not limited to, a bispecific T cell engager that targets CD19 (e.g., blinatumomab), SAR3419 (Sanofi), MEDI-551 (Medlmmune LLC), Combotox, DT2219ARL (Masonic Cancer Center), MOR-208 (also called XmAb-5574; MorphoSys), XmAb-5871 (Xencor), MDX-1342 (Bristol-Myers Squibb), SGN-CD19A (Seattle Genetics), and AFM11 (Affimed Therapeutics). See, e.g., Hammer. MAbs. 4.5(2012): 571-77. Blinatomomab is a bispecific antibody comprised of two scFvs-one that binds to CD19 and one that binds to CD3. Blinatomomab directs T cells to attack cancer cells. See, e.g., Hammer et al.; Clinical Trial Identifier No. NCT00274742 and NCT01209286. MEDI-551 is a humanized anti-CD19 antibody with a Fc engineered to have enhanced antibody-dependent cell-mediated cytotoxicity (ADCC). See, e.g., Hammer et al.; and Clinical Trial Identifier No. NCT01957579. Combotox is a mixture of immunotoxins that bind to CD19 and CD22. The immunotoxins are made up of scFv antibody fragments fused to a deglycosylated ricin A chain. See, e.g., Hammer et al.; and Herrera et al. J. Pediatr. Hematol. Oncol. 31.12(2009):936-41; Schindler et al. Br. J. Haematol. 154.4(2011):471-6. DT2219ARL is a bispecific immunotoxin targeting CD19 and CD22, comprising two scFvs and a truncated diphtheria toxin. See, e.g., Hammer et al.; and Clinical Trial Identifier No. NCT00889408. SGN-CD19A is an antibody-drug conjugate (ADC) comprised of an anti-CD19 humanized monoclonal antibody linked to a synthetic cytotoxic cell-killing agent, monomethyl auristatin F (MMAF). See, e.g., Hammer et al.; and Clinical Trial Identifier Nos. NCT01786096 and NCT01786135. SAR3419 is an anti-CD19 antibody-drug conjugate (ADC) comprising an anti-CD19 humanized monoclonal antibody conjugated to a maytansine derivative via a cleavable linker. See, e.g., Younes et al. J. Clin. Oncol. 30.2(2012): 2776-82; Hammer et al.; Clinical Trial Identifier No. NCT00549185; and Blanc et al. Clin Cancer Res. 2011; 17:6448-58. XmAb-5871 is an Fc-engineered, humanized anti-CD19 antibody. See, e.g., Hammer et al. MDX-1342 is a human Fc-engineered anti-CD19 antibody with enhanced ADCC. See, e.g., Hammer et al. In some embodiments, the antibody molecule is a bispecific anti-CD19 and anti-CD3 molecule. For instance, AFM11 is a bispecific antibody that targets CD19 and CD3. See, e.g., Hammer et al.; and Clinical Trial Identifier No. NCT02106091.

[0590] In certain embodiments, a CAR molecule used in the methods and combinations of the disclosure is monospecific and has specificity only for CD19, whether or not the CD19 binding domain is derived from a mono- or multispecific antibody.

[0591] In one embodiment, an antigen binding domain against CD19 is an antigen binding portion, e.g., CDRs, of an antigen binding domain described in a Table herein, e.g., in Table 1 or in this Section 7.3, including its subparts. In one embodiment, a CD19 antigen binding domain can be from any CD19 CAR, e.g., LG-740; U.S. Pat. Nos. 8,399,645; 7,446,190; Xu et al., 2013, Leuk Lymphoma. 54(2):255-260(2012); Cruz et al., 2013, Blood 122(17):2965-2973; Brentjens et al., 2011, Blood, 118(18):4817-4828; Kochenderfer et al., 2010, Blood 116(20):4099-102; Kochenderfer et al., 2013, Blood 122 (25):4129-39; and 16th Annu Meet Am Soc Gen Cell Ther (ASGCT) (May 15-18, Salt Lake City) 2013, Abst 10, each of which is herein incorporated by reference in its entirety.

[0592] In one aspect, the anti-CD19 protein binding portion of the CAR is a scFv antibody fragment. In one aspect such antibody fragments are functional in that they retain the equivalent binding affinity, e.g., they bind the same antigen with comparable affinity, as the IgG antibody from which it is derived. In one aspect such antibody fragments are functional in that they provide a biological response that can include, but is not limited to, activation of an immune response, inhibition of signal-transduction origination from its target antigen, inhibition of kinase activity, and the like, as will be understood by a skilled artisan. In one aspect, the anti-CD19 antigen binding domain of the CAR is a scFv antibody fragment that is humanized compared to the murine sequence of the scFv from which it is derived. In one aspect, the parental murine scFv sequence is the CAR19 construct provided in PCT publication WO2012/079000 and provided herein as SEQ ID NO:149. In one embodiment, the anti-CD19 binding domain is a scFv described in WO2012/079000 and provided in SEQ ID NO: 149, or a sequence at least 95%, e.g., 95-99%, identical thereto. In an embodiment, the anti-CD19 binding domain is part of a CAR construct provided in POT publication WO2012/079000 and provided herein as SEQ ID NO: 148, or a sequence at least 95%, e.g., 95%-99%, identical thereto. In an embodiment, the anti-CD19 binding domain comprises at least one (e.g., 2, 3, 4, 5, or 6) CDRs selected from Table 14 and/or Table 15.

TABLE 14
Heavy Chain Variable Domain CDRs

| | | | SEQ | | SEQ | | SEQ |
|---|---|---|---|---|---|---|---|
| | | | ID | | ID | | ID |
| Molecule | FW | CDR-H1 | NO | CDR-H2 | NO | CDR-H3 | NO |
| murine_CART19 | | GVSLPDYGVS | 113 | VIWGSETTYYNSALKS | 114 | HYYYGGSYAMDY | 118 |
| humanized_CART19 a | VH4 | GVSLPDYGVS | 113 | VIWGSETTYYSSSLKS | 115 | HYYYGGSYAMDY | 118 |
| humanized_CART19 b | VH4 | GVSLPDYGVS | 113 | VIWGSETTYYQSSLKS | 116 | HYYYGGSYAMDY | 118 |
| humanized_CART19 c | VH4 | GVSLPDYGVS | 113 | VIWGSETTYYNSSLKS | 117 | HYYYGGSYAMDY | 118 |

TABLE 15
Light Chain Variable Domain CDRs

| | | | SEQ | | SEQ | | SEQ |
|---|---|---|---|---|---|---|---|
| | | | ID | | ID | | ID |
| Candidate | FW | CDR-L1 | NO | CDR-L2 | NO | CDR-L3 | NO |
| murine_CART19 | | RASQDISKYLN | 119 | HTSRLHS | 120 | QQGNTLPYT | 121 |
| humanized_CART19 a | VK3 | RASQDISKYLN | 119 | HTSRLHS | 120 | QQGNTLPYT | 121 |
| humanized_CART19 b | VK3 | RASQDISKYLN | 119 | HTSRLHS | 120 | QQGNTLPYT | 121 |
| humanized_CART19 c | VK3 | RASQDISKYLN | 119 | HTSRLHS | 120 | QQGNTLPYT | 121 |

[0593] In one aspect, the CAR comprises the polypeptide sequence provided as SEQ ID NO:12 in POT publication WO2012/079000, and provided herein as SEQ ID NO:149, wherein the scFv domain is substituted by one or more sequences selected from SEQ ID NOS: 96-107. In one aspect, the scFv domains of SEQ ID NOS:96-107 are humanized variants of the scFv domain of SEQ ID NO: 149, which is an scFv fragment of murine origin that specifically binds to human 0019. Humanization of this mouse scFv may be desired for the clinical setting, where the mouse-specific residues may induce a human-anti-mouse antigen (HAMA) response in subjects who receive CART19 treatment, e.g., treatment with T cells transduced with the CAR19 construct.

[0594] In one embodiment, the CD19 CAR comprises an amino acid sequence provided as SEQ ID NO:12 in PCT publication WO2012/079000. In embodiment, the amino acid sequence is:

(SEQ ID NO: 148)
MALPVTALLLPLALLLHAARPdiqmtqttsslsaslgdrvtiscrasqdiskylnwyqqkpdgtvklliyhtsrlhsg
vpsrfsgsgsgtdysltisnleqediatyfcqqgntlpytfgggtkleitggggsggggsggggsevklqesgpglvapsqsl
svtctvsgvslpdygvswirqpprkglewlgviwgsettyynsalksrltiikdnsksqvflkmnslqtddtaiyycakhyyyg
gsyamdywgqgtsvtvsstttpaprpptpaptiasqplslrpeacrpaaggavhtrgldfacdiyiwaplagtcgvlllslvitly
ckrgrkkllyifkqpfmrpvqttqeedgcscrfpeeeeggcelrvkfsrsadapaykqgqnqlynelnlgrreeydvldkrrgr
dpemggkprrknpqeglynelqkdkmaeayseigmkgerrrgkghdglyqglstatkdtydalhmqalppr,

or a sequence substantially homologous thereto.

[0595] In another embodiment, the amino acid sequence is

(SEQ ID NO: 213)
diqmtqttsslsaslgdrvtiscrasqdiskylnwyqqkpdgtvklliyhtsrlhsgvpsrfsgsgsgtdysltisnleqediatyf
cqqgntlpytfgggtkleitggggsggggsggggsevklqesgpglvapsqslsvtctvsgvslpdygvswirqpprkgle
wlgviwgsettyynsalksrltiikdnsksqvflkmnslqtddtaiyycakhyyyggsyamdywgqgtsvtvsstttpaprpp
tpaptiasqplslrpeacrpaaggavhtrgldfacdiyiwaplagtcgvlllslvitlyckrgrkkllyifkqpfmrpvqttqeedgc
scrfpeeeeggcelrvkfsrsadapaykqgqnqlynelnlgrreeydvldkrrgrdpemggkprrknpqeglynelqkdk
[sequence omitted]

[0596] or a sequence substantially homologous thereto.

[0597] In one aspect, the humanized CAR19 comprises the scFv portion provided in SEQ ID NO:96. In one aspect, the humanized CAR19 comprises the scFv portion provided in SEQ ID NO:97. In one aspect, the humanized CAR19 comprises the scFv portion provided in SEQ ID NO:98. In one aspect, the humanized CAR19 comprises the scFv portion provided in SEQ ID NO:99. In one aspect, the humanized CAR19 comprises the scFv portion provided in SEQ ID NO:100. In one aspect, the humanized CAR19 comprises the scFv portion provided in SEQ ID NO:101. In one aspect, the humanized CAR19 comprises the scFv portion provided in SEQ ID NO:102. In one aspect, the humanized CAR19 comprises the scFv portion provided in SEQ ID NO:103. In one aspect, the humanized CAR19 comprises the scFv portion provided in SEQ ID NO:104. In one aspect, the humanized CAR19 comprises the scFv portion provided in SEQ ID NO:105. In one aspect, the humanized CAR19 comprises the scFv portion provided in SEQ ID NO:106. In one aspect, the humanized CAR19 comprises the scFv portion provided in SEQ ID NO:107.

[0598] In one aspect, the CARs of the disclosure combine an antigen binding domain of a specific antibody with an intracellular signaling molecule. For example, in some aspects, the intracellular signaling molecule includes, but is not limited to, CD3-zeta chain, 4-1BB and CD28 signaling modules and combinations thereof. In one aspect, the CD19 CAR comprises a CAR selected from the sequence provided in one or more of SEQ ID NOS: 122-133. In one aspect, the CD19 CAR comprises the sequence provided in SEQ ID NO:122. In one aspect, the CD19 CAR comprises the sequence provided in SEQ ID NO:123. In one aspect, the CD19 CAR comprises the sequence provided in SEQ ID NO:124. In one aspect, the CD19 CAR comprises the sequence provided in SEQ ID NO:125. In one aspect, the CD19 CAR comprises the sequence provided in SEQ ID NO:126. In one aspect, the CD19 CAR comprises the sequence provided in SEQ ID NO:127. In one aspect, the CD19 CAR comprises the sequence provided in SEQ ID NO:128. In one aspect, the CD19 CAR comprises the sequence provided in SEQ ID NO:129. In one aspect, the CD19 CAR comprises the sequence provided in SEQ ID NO:130. In one aspect, the CD19 CAR comprises the sequence provided in SEQ ID NO:131. In one aspect, the CD19 CAR comprises the sequence provided in SEQ ID NO:132. In one aspect, the CD19 CAR comprises the sequence provided in SEQ ID NO:133.

[0599] In some embodiments, the CAR molecule is a CD19 CAR molecule described herein, e.g., a humanized CAR molecule described herein, e.g., a humanized CD19 CAR molecule of Table 16 or having CDRs as set out in Table 14 and Table 15.

[0600] In some embodiments, the CAR molecule is a CD19 CAR molecule described herein, e.g., a murine CAR molecule described herein, e.g., a murine CD19 CAR molecule of Table 17 or having CDRs as set out in Table 14 and Table 15.

[0601] In some embodiments, the CAR molecule comprises one, two, and/or three CDRs from the heavy chain variable region and/or one, two, and/or three CDRs from the light chain variable region of the murine or humanized CD19 CAR of Table 14 and Table 15.

[0602] In one embodiment, the antigen binding domain comprises one, two three (e.g., all three) heavy chain CDRs, CDR-H1, CDR-H2 and CDR-H3, from an antibody listed above, and/or one, two, three (e.g., all three) light chain CDRs, CDR-L1, CDR-L2 and CDR-L3, from an antibody listed above. In one embodiment, the antigen binding domain comprises a heavy chain variable region and/or a variable light chain region of an antibody listed or described above.

[0603] In an embodiment, the antigen binding domain comprises a humanized antibody or an antibody fragment. In one embodiment, the humanized anti-CD19 binding domain comprises one or more (e.g., all three) light chain complementary determining region 1 (CDR-L1), light chain complementary determining region 2 (CDR-L2), and light chain complementary determining region 3 (CDR-L3) of a murine or humanized anti-CD19 binding domain described herein, and/or one or more (e.g., all three) heavy chain complementary determining region 1 (CDR-H1), heavy chain complementary determining region 2 (CDR-H2), and heavy chain complementary determining region 3 (CDR-H3) of a murine or humanized anti-CD19 binding domain described herein, e.g., a humanized anti-CD19 binding domain comprising one or more, e.g., all three, light chain CDRs and one or more, e.g., all three, heavy chain CDRs.

[0604] In one embodiment, an antigen binding domain comprises one, two three (e.g., all three) heavy chain CDRs, CDR-H1, CDR-H2 and CDR-H3, from an antibody listed herein, e.g., in Table 14, Table 16, or Table 17 and/or one, two, three (e.g., all three) light chain CDRs, CDR-L1, CDR-L2 and CDR-L3, from an antibody listed herein, e.g., in Table 15, Table 16, or Table 17. In one embodiment, the antigen binding domain comprises a heavy chain variable region and/or a variable light chain region of an antibody listed or described above.

[0605] In an embodiment, the CD19 binding domain (e.g., an scFv) comprises: a light chain variable region comprising an amino acid sequence having at least one, two or three modifications (e.g., substitutions) but not more than 30, 20 or 10 modifications (e.g., substitutions) of an amino acid sequence of a light chain variable region provided in Table 16 or Table 17, or a sequence with at least 95% (e.g., 95-99%) identity with an amino acid sequence of Table 16 or Table 17; and/or a heavy chain variable region comprising an amino acid sequence having at least one, two or three modifications (e.g., substitutions) but not more than 30, 20 or 10 modifications (e.g., substitutions) of an amino acid sequence of a heavy chain variable region provided in Table 16 or Table 17, or a sequence with at least 95% (e.g., 95-99%) identity to an amino acid sequence of Table 16 or Table 17.

[0606] In some embodiments, the CD19 binding domain comprises one or more CDRs (e.g., one each of a CDR-H1, CDR-H2, CDR-H3, CDR-L1, CDR-L2, and CDR-L3) of Table 16 or Table 17, or CDRs having one, two, three, four, five, or six modifications (e.g., substitutions) of one or more of the CDRs.

[0607] Exemplary anti-CD19 antibody molecules (including antibodies or fragments or conjugates thereof) can include a scFv, CDRs, or VH and VL chains described in any one of Table 14, Table 15, Table 16, or Table 17. In an embodiment, the CD19-binding antibody molecule comprises: a light chain variable region comprising an amino acid sequence having at least one, two or three modifications (e.g., substitutions) but not more than 30, 20 or 10 modifications (e.g., substitutions) of an amino acid sequence of a light chain variable region provided in Table 16 or Table 17, or a sequence with at least 95% (e.g., 95-99%) identity with an amino acid sequence of Table 16 or Table 17; and/or a heavy chain variable region comprising an amino acid sequence having at least one, two or three modifications (e.g., substitutions) but not more than 30, 20 or 10 modifications (e.g., substitutions) of an amino acid sequence of a heavy chain variable region provided in Table 16 or Table 17, or a sequence with at least 95% (e.g., 95-99%) identity to an amino acid sequence of Table 16 or Table 17. In some embodiments, the CD19-binding antibody molecule comprises one or more CDRs (e.g., one each of a CDR-H1, CDR-H2, CDR-H3, CDR-L1, CDR-L2, and CDR-L3) of Table 14 or Table 15, or CDRs having one, two, three, four, five, or six modifications (e.g., substitutions) of one or more of the CDRs.

[0608] In some embodiments, the humanized anti-CD19 binding domain comprises a CDR-H1, a CDR-H2, and a CDR-H3 of any heavy chain binding domain amino acid sequences listed in Table 16 or Table 17. In some embodiments, the antigen binding domain further comprises a CDR-L1, a CDR-L2, and a CDR-L3. In some embodiments, the antigen binding domain comprises a CDR-L1, a CDR-L2, and a CDR-L3 of any light chain binding domain amino acid sequences listed in Table 16 or Table 17.

[0609] In some embodiments, the antigen binding domain comprises one, two or all of CDR-11, CDR-L2, and CDR-L3 of any light chain binding domain amino acid sequences listed in Table 3 or Table 17, and one, two or all of CDR-H1, CDR-H2, and CDR-H3 of any heavy chain binding domain amino acid sequences listed in Table 17.

[0610] In some embodiments, the CDRs are defined according to the Kabat numbering scheme, the Chothia numbering scheme, or a combination thereof.

[0611] The sequences of humanized CDR sequences of the scFv domains are shown in Table 14 for the heavy chain variable domains and in Table 15 for the light chain variable domains. “ID” stands for the respective SEQ ID NO for each CDR.

[0612] In some embodiments, the CD19 binding domain comprises a Kabat CDR-H1 having a sequence of DYGVS (SEQ ID NO:214), an CDR-H2 of Table 14, an CDR-H3 of Table 14, an CDR-L1 of Table 15, an CDR-L2 of Table 15, and an CDR-L3 of Table 15.

[0613] In one embodiment, the humanized anti-CD19 binding domain comprises a sequence selected from a group consisting of SEQ ID NO:96, SEQ ID NO:97, SEQ ID NO:98, SEQ ID NO:99, SEQ ID NO:100, SEQ ID NO:101, SEQ ID NO:102, SEQ ID NO:103, SEQ ID NO:104, SEQ ID NO:105, SEQ ID NO:106, and SEQ ID NO:107, or a sequence with 95-99% identity thereof. In one embodiment, the nucleic acid sequence encoding the humanized anti-CD19 binding domain comprises a sequence selected from a group consisting of SEQ ID NO:151, SEQ ID NO:152, SEQ ID NO:153, SEQ ID NO:154, SEQ ID NO:155, SEQ ID NO:156, SEQ ID NO:157, SEQ ID NO:158, SEQ ID NO:159, SEQ ID NO:160 and SEQ ID NO:161, or a sequence with 95-99% identity thereof.

[0614] In one embodiment, the humanized anti-CD19 binding domain is a scFv, and a light chain variable region comprising an amino acid sequence described herein, e.g., in Table 16 or Table 17, is attached to a heavy chain variable region comprising an amino acid sequence described herein, e.g., in Table 16 or Table 17, via a linker, e.g., a linker described herein. In one embodiment, the humanized anti-CD19 binding domain includes a (Gly₄-Ser)n linker, wherein n is 1, 2, 3, 4, 5, or 6, e.g., 3 or 4 (SEQ ID NO:144). The light chain variable region and heavy chain variable region of a scFv can be, e.g., in any of the following orientations: light chain variable region-linker-heavy chain variable region or heavy chain variable region-linker-light chain variable region.

[0615] In one aspect, the antigen binding domain portion comprises one or more sequence selected from SEQ ID NOS:96-107. In one aspect the humanized CAR is selected from one or more sequence selected from SEQ ID NOS: 122-133. In some aspects, a non-human antibody is humanized, where specific sequences or regions of the antibody are modified to increase similarity to an antibody naturally produced in a human or fragment thereof.

[0616] In one embodiment, the anti-CD19 binding domain is a scFv, and a light chain variable region comprising an amino acid sequence described herein, e.g., in Table 16 or Table 17, is attached to a heavy chain variable region comprising an amino acid sequence described herein, e.g., in Table 16 or Table 17, via a linker, e.g., a linker described herein. In one embodiment, the antigen binding domain includes a (Gly₄-Ser)n linker, wherein n is 1, 2, 3, 4, 5, or 6, e.g., 3 or 4 (SEQ ID NO:144). The light chain variable region and heavy chain variable region of a scFv can be, e.g., in any of the following orientations: light chain variable region-linker-heavy chain variable region or heavy chain variable region-linker-light chain variable region.

[0617] In some embodiments, the CAR molecule comprises a CD19 binding domain, a transmembrane domain, and an intracellular signaling domain comprising a stimulatory domain, and wherein said CD19 binding domain comprises one or more of (e.g., all three of) light chain complementary determining region 1 (CDR-L1), light chain complementary determining region 2 (CDR-L2), and light chain complementary determining region 3 (CDR-L3) of any CD19 light chain binding domain amino acid sequence listed in Table 16 or Table 17, and one or more of (e.g., all three of) heavy chain complementary determining region 1 (CDR-H1), heavy chain complementary determining region 2 (CDR-H2), and heavy chain complementary determining region 3 (CDR-H3) of any CD19 heavy chain binding domain amino acid sequence listed in Table 16 or Table 17.

[0618] In some embodiments, a CD19 CAR comprises light chain variable region listed in Table 16 or Table 17 and any heavy chain variable region listed Table 16 or Table 17.

[0619] In some embodiments, the CAR molecule comprises a CD19 binding domain which comprises a sequence selected from a group consisting of SEQ ID NO:96, SEQ ID NO:97, SEQ ID NO:98, SEQ ID NO:99, SEQ ID NO:100, SEQ ID NO:101, SEQ ID NO:102, SEQ ID NO:103, SEQ ID NO:104, SEQ ID NO:105, SEQ ID NO:106 and SEQ ID NO:107, or a sequence with 95-99% identity thereof. In some embodiments, the CD19 CAR comprises a polypeptide of SEQ ID NO:148.

[0620] In one embodiment, the CAR molecule comprises an anti-CD19 binding domain comprising one or more (e.g., all three) light chain complementary determining region 1 (CDR-L1), light chain complementary determining region 2 (CDR-L2), and light chain complementary determining region 3 (CDR-L3) of an anti-CD19 binding domain described herein, and one or more (e.g., all three) heavy chain complementary determining region 1 (CDR-H1), heavy chain complementary determining region 2 (CDR-H2), and heavy chain complementary determining region 3 (CDR-H3) of an anti-CD19 binding domain described herein, e.g., an anti-CD19 binding domain comprising one or more, e.g., all three, light chain CDRs and one or more, e.g., all three, heavy chain CDRs. In one embodiment, the anti-CD19 binding domain comprises one or more (e.g., all three) heavy chain complementary determining region 1 (CDR-H1), heavy chain complementary determining region 2 (CDR-H2), and heavy chain complementary determining region 3 (CDR-H3) of an anti-CD19 binding domain described herein, e.g., the anti-CD19 binding domain has two variable heavy chain regions, each comprising a CDR-H1, a CDR-H2 and a CDR-H3 described herein.

[0621] In one aspect, the anti-CD19 binding domain is characterized by particular functional features or properties of an antibody or antibody fragment. For example, in one aspect, the portion of a CAR molecule that comprises an antigen binding domain specifically binds human CD19. In one aspect, the disclosure relates to an antigen binding domain comprising an antibody or antibody fragment, wherein the antibody binding domain specifically binds to a CD19 protein or fragment thereof, wherein the antibody or antibody fragment comprises a variable light chain and/or a variable heavy chain that includes an amino acid sequence of SEQ ID NO:96-107 or SEQ ID NO:149. In one aspect, the antigen binding domain comprises an amino acid sequence of an scFv selected from SEQ ID NOs: 96-107 or SEQ ID NO:149. In certain aspects, the scFv is contiguous with and in the same reading frame as a leader sequence.

### 7.3.2. Transmembrane Domain and Optional Hinge

[0622] With respect to the transmembrane domain, in various embodiments, a CAR can be designed to comprise a transmembrane domain that is attached to the extracellular domain of the CAR. A transmembrane domain can include one or more additional amino acids adjacent to the transmembrane region, e.g., one or more amino acid associated with the extracellular region of the protein from which the transmembrane was derived (e.g., 1, 2, 3, 4, 5, 6, 7, 8, 9, 10 up to 15 amino acids of the extracellular region) and/or one or more additional amino acids associated with the intracellular region of the protein from which the transmembrane protein is derived (e.g., 1, 2, 3, 4, 5, 6, 7, 8, 9, 10 up to 15 amino acids of the intracellular region). In one aspect, the transmembrane domain is one that is associated with one of the other domains of the CAR. In one embodiment, the transmembrane domain may be from the same protein that the signaling domain, costimulatory domain or the hinge domain is derived from. In another aspect, the transmembrane domain is not derived from the same protein that any other domain of the CAR is derived from. In some instances, the transmembrane domain can be selected or modified by amino acid substitution to avoid binding of such domains to the transmembrane domains of the same or different surface membrane proteins, e.g., to minimize interactions with other members of the receptor complex. In one aspect, the transmembrane domain is capable of homodimerization with another CAR on the cell surface of a CAR-expressing cell. In a different aspect the amino acid sequence of the transmembrane domain may be modified or substituted so as to minimize interactions with the binding domains of the native binding partner present in the same CAR-expressing cell.

[0623] The transmembrane domain may be derived either from a natural or from a recombinant source. Where the source is natural, the domain may be derived from any membrane-bound or transmembrane protein. In one aspect the transmembrane domain is capable of signaling to the intracellular domain(s) whenever the CAR has bound to a target. A transmembrane domain of particular use in this disclosure may include at least the transmembrane region(s) of e.g., the alpha, beta or zeta chain of the T-cell receptor, CD28, CD3 epsilon, CD45, CD4, CD5, CD8, CD9, CD16, CD22, CD33, CD37, CD64, CD80, CD86, CD134, CD137, CD154. In some embodiments, a transmembrane domain may include at least the transmembrane region(s) of, e.g., KIRDS2, OX40, CD2, CD27, LFA-1 (CD11a, CD18), ICOS (CD278), 4-1BB (CD137), GITR, CD40, BAFFR, HVEM (LIGHTR), SLAMF7, NKp80 (KLRF1), NKp44, NKp30, NKp46, CD160, CD19, IL2R beta, IL2R gamma, IL7R α, ITGA1, VLA1, CD49a, ITGA4, IA4, CD49D, ITGA6, VLA-6, CD49f, ITGAD, CD11d, ITGAE, CD103, ITGAL, CD11a, LFA-1, ITGAM, CD11b, ITGAX, CD11c, ITGB1, CD29, ITGB2, CD18, LFA-1, ITGB7, TNFR2, DNAM1 (CD226), SLAMF4 (CD244, 2B4), CD84, CD96 (Tactile), CEACAM1, CRTAM, Ly9 (CD229), CD160 (BY55), PSGL1, CD100 (SEMA4D), SLAMF6 (NTB-A, Ly108), SLAM (SLAMF1, CD150, IPO-3), BLAME (SLAMF8), SELPLG (CD162), LTBR, PAG/Cbp, NKG2D, NKG2C, or CD19.

[0624] In some instances, the transmembrane domain can be attached to the extracellular region of the CAR, e.g., the antigen binding domain of the CAR, via a hinge, e.g., a hinge from a human protein. For example, in one embodiment, the hinge can be a human Ig (immunoglobulin) hinge, e.g., an IgG4 hinge, an IgD hinge, a GS linker (e.g., a GS linker described herein), a KIR2DS2 hinge, or a CD8a hinge.

[0625] In one aspect, the transmembrane domain may be recombinant, in which case it will comprise predominantly hydrophobic residues such as leucine and valine. In one aspect a triplet of phenylalanine, tryptophan and valine can be found at each end of a recombinant transmembrane domain.

[0626] Optionally, a short oligo- or polypeptide linker, between 2 and 10 amino acids in length may form the linkage between the transmembrane domain and the cytoplasmic region of the CAR. A glycine-serine doublet provides a particularly suitable linker. For example, in one aspect, the linker comprises the amino acid sequence of GGGGSGGGGS (SEQ ID NO:140). In some embodiments, the linker is encoded by a nucleotide sequence of GGTGGCGGAGGTTCTGGAGGTGGAGGTTCC (SEQ ID NO:141).

[0627] In one aspect, the hinge or spacer comprises a KIR2DS2 hinge.

### 7.3.3. Intracellular Signaling Domain

[0628] The cytoplasmic domain or region of the CAR includes an intracellular signaling domain. An intracellular signaling domain is generally responsible for activation of at least one of the normal effector functions of the immune cell in which the CAR has been introduced.

[0629] Examples of intracellular signaling domains for use in the CAR include the cytoplasmic sequences of the T cell receptor (TCR) and co-receptors that act in concert to initiate signal transduction following antigen receptor engagement, as well as any derivative or variant of these sequences and any recombinant sequence that has the same functional capability.

[0630] It is known that signals generated through the TCR alone are insufficient for full activation of the T cell and that a secondary and/or costimulatory signal is also required. Thus, T cell activation can be said to be mediated by two distinct classes of cytoplasmic signaling sequences: those that initiate antigen-dependent primary activation through the TCR (primary intracellular signaling domains) and those that act in an antigen-independent manner to provide a secondary or costimulatory signal (secondary cytoplasmic domain, e.g., a costimulatory domain).

[0631] A primary signaling domain regulates primary activation of the TCR complex either in a stimulatory way, or in an inhibitory way. Primary intracellular signaling domains that act in a stimulatory manner may contain signaling motifs which are known as immunoreceptor tyrosine-based activation motifs or ITAMs.

[0632] Examples of ITAM containing primary intracellular signaling domains that are of particular use in the disclosure include those of CD3-zeta, common FcR gamma (FCER1G), Fc gamma RIIa, FcR beta (Fc Epsilon R1b), CD3 gamma, CD3 delta, CD3 epsilon, CD79a, CD79b, CD278 (also known as “ICOS”), FcεRI, DAP10, DAP12, and CD66d. In one embodiment, a CAR of the disclosure comprises an intracellular signaling domain, e.g., a primary signaling domain of CD3-zeta.

[0633] In certain embodiments, the stimulatory molecule is the zeta chain associated with the T cell receptor complex. In one aspect, the cytoplasmic signaling domain further comprises one or more functional signaling domains derived from at least one costimulatory molecule as defined below.

[0634] In further embodiments, the costimulatory molecule is chosen from the costimulatory molecules described herein, e.g., 4-1BB (i.e., CD137), CD27 and/or CD28.

[0635] Accordingly, a CAR molecule that can be used in the methods and combinations of the disclosure can comprise at least one intracellular domain selected from the group of a CD137 (4-1BB) signaling domain, a CD28 signaling domain, a CD3-zeta signaling domain, and any combination thereof and/or at least one intracellular signaling domain is from one or more co-stimulatory molecule(s), which are optionally other than a CD137 (4-1BB) or CD28.

[0636] In one embodiment, a primary signaling domain comprises a modified ITAM domain, e.g., a mutated ITAM domain which has altered (e.g., increased or decreased) activity as compared to the native ITAM domain. In one embodiment, a primary signaling domain comprises a modified ITAM-containing primary intracellular signaling domain, e.g., an optimized and/or truncated ITAM-containing primary intracellular signaling domain. In an embodiment, a primary signaling domain comprises one, two, three, four or more ITAM motifs.

[0637] Further examples of molecules containing a primary intracellular signaling domain that are of particular use in the disclosure include those of DAP10, DAP12, and CD32. In an embodiment, the intracellular signaling domain (also referred to as the cytoplasmic domain) can comprise a primary intracellular signaling domain. Exemplary primary intracellular signaling domains include those derived from the molecules responsible for primary stimulation, or antigen dependent simulation. In an embodiment, the intracellular signaling domain can comprise a costimulatory intracellular domain. Exemplary costimulatory intracellular signaling domains include those derived from molecules responsible for costimulatory signals, or antigen independent stimulation. For example, in the case of a CART, a primary intracellular signaling domain can comprise a cytoplasmic sequence of a T cell receptor, and a costimulatory intracellular signaling domain can comprise cytoplasmic sequence from co-receptor or costimulatory molecule.

[0638] Primary Intracellular Signaling Domain: A primary intracellular signaling domain can comprise a signaling motif which is known as an immunoreceptor tyrosine-based activation motif or ITAM. Examples of ITAM containing primary cytoplasmic signaling sequences include, but are not limited to, those derived from CD3-zeta, FcR gamma, common FcR gamma (FCER1G), Fc gamma RIIa, FcR beta (Fc Epsilon R1b), CD3 gamma, CD3 delta, CD3 epsilon, CD22, CD79a, CD79b, CD278 (“ICOS”), FcεRI, CD66d, CD32, DAP10 and DAP12.

[0639] Costimulatory Intracellular Signaling Domain: The intracellular signaling domain of the CAR can comprise the CD3-zeta signaling domain by itself or it can be combined with any other desired intracellular signaling domain(s) useful in the context of a CAR of the disclosure. For example, the intracellular signaling domain of the CAR can comprise a CD3-zeta chain portion and a costimulatory signaling domain. The costimulatory signaling domain refers to a portion of the CAR comprising the intracellular domain of a costimulatory molecule.

[0640] A costimulatory molecule can be a cell surface molecule other than an antigen receptor or its ligands that is required for an efficient response of lymphocytes to an antigen. Examples of such molecules include CD27, CD28, 4-1BB (CD137), OX40, CD30, CD40, PD1, ICOS, lymphocyte function-associated antigen-1 (LFA-1), CD2, CD7, LIGHT, NKG2C, B7-H3, and a ligand that specifically binds with CD83, and the like. For example, CD27 costimulation has been demonstrated to enhance expansion, effector function, and survival of human CART cells in vitro and augments human T cell persistence and antitumor activity in vivo (Song et al. Blood. 2012; 119(3):696-706). Further examples of such costimulatory molecules include MHC class I molecule, TNF receptor proteins, Immunoglobulin-like proteins, cytokine receptors, integrins, signaling lymphocytic activation molecules (SLAM proteins), activating NK cell receptors, BTLA, a Toll ligand receptor, OX40, CD2, CD7, CD27, CD28, CD30, CD40, CDS, ICAM-1, LFA-1 (CD11a/CD18), 4-1BB (CD137), B7-H3, CDS, ICAM-1, ICOS (CD278), GITR, BAFFR, LIGHT, HVEM (LIGHTR), KIRDS2, SLAMF7, NKp80 (KLRF1), NKp44, NKp30, NKp46, CD19, CD4, CD8alpha, CD8beta, IL2R beta, IL2R gamma, IL7R alpha, ITGA4, VLA1, CD49a, ITGA4, IA4, CD49D, ITGA6, VLA-6, CD49f, ITGAD, CD11d, ITGAE, CD103, ITGAL, CD11a, LFA-1, ITGAM, CD11b, ITGAX, CD11c, ITGB1, CD29, ITGB2, CD18, LFA-1, ITGB7, NKG2D, NKG2C, TNFR2, TRANCE/RANKL, DNAM1 (CD226), SLAMF4 (CD244, 2B4), CD84, CD96 (Tactile), CEACAM1, CRTAM, Ly9 (CD229), CD160 (BY55), PSGL1, CD100 (SEMA4D), CD69, SLAMF6 (NTB-A, Ly108), SLAM (SLAMF1, CD150, IPO-3), BLAME (SLAMF8), SELPLG (CD162), LTBR, LAT, GADS, SLP-76, PAG/Cbp, CD19a, and a ligand that specifically binds with CD83.

[0641] In one embodiment, the intracellular domain is designed to comprise the signaling domain of CD3-zeta and the signaling domain of CD28. In one aspect, the intracellular domain is designed to comprise the signaling domain of CD3-zeta and the signaling domain of ICOS.

[0642] The intracellular signaling sequences within the cytoplasmic portion of the CAR of the disclosure may be linked to each other in a random or specified order. Optionally, a short oligo- or polypeptide linker, for example, between 2 and 10 amino acids (e.g., 2, 3, 4, 5, 6, 7, 8, 9, or 10 amino acids) in length may form the linkage between intracellular signaling sequence. In one embodiment, a glycine-serine doublet can be used as a suitable linker. In one embodiment, a single amino acid, e.g., an alanine, a glycine, can be used as a suitable linker.

[0643] In one aspect, the intracellular signaling domain is designed to comprise two or more, e.g., 2, 3, 4, 5, or more, costimulatory signaling domains. In an embodiment, the two or more, e.g., 2, 3, 4, 5, or more, costimulatory signaling domains, are separated by a linker molecule, e.g., a linker molecule described herein. In one embodiment, the intracellular signaling domain comprises two costimulatory signaling domains. In some embodiments, the linker molecule is a glycine residue. In some embodiments, the linker is an alanine residue.

[0644] In one aspect, the intracellular signaling domain is designed to comprise the signaling domain of CD3-zeta and the signaling domain of CD28. In one aspect, the intracellular signaling domain is designed to comprise the signaling domain of CD3-zeta and the signaling domain of 4-1BB. In one aspect, the signaling domain of 4-1BB is a signaling domain of SEQ ID NO:1156. In one aspect, the signaling domain of CD3-zeta is a signaling domain of SEQ ID NO:1160 or SEQ ID NO:1162. In certain aspects, the CAR-T comprises a CAR molecule having the sequence of SEQ ID NO:97 or SEQ ID NO:149.

[0645] In one aspect, the intracellular signaling domain is designed to comprise the signaling domain of CD3-zeta and the signaling domain of CD27.

[0646] A costimulatory intracellular signaling domain refers to the intracellular portion of a costimulatory molecule. The intracellular signaling domain can comprise the entire intracellular portion, or the entire native intracellular signaling domain, of the molecule from which it is derived, or a functional fragment or derivative thereof.

### 7.3.4. Exemplary CAR Molecules

[0647] Provided herein are the sequence of exemplary CAR molecules that can be used in the methods and combinations of the disclosure as well as their encoding nucleic acid sequences. Typically a CAR molecule useful in the methods and combinations of the disclosure is encoded by CAR construct that encodes an optional leader sequence, an extracellular antigen binding domain, a hinge, a transmembrane domain, and an intracellular stimulatory domain. In some embodiments, the CAR constructs further encodes an intracellular costimulatory domain, such that the expressed CAR molecule comprises an optional leader sequence, an extracellular antigen binding domain, a hinge, a transmembrane domain, an intracellular costimulatory domain and an intracellular stimulatory domain.

[0648] Exemplary CAR component sequences are shown in Table C.

TABLE C
Sequences of various components of CAR

| SEQ ID | | |
|---|---|---|
| NO | Description | Sequence |
| 1144 | EF-1α | CGTGAGGCTCCGGTGCCCGTCAGTGGGCAGAGCGCACATCGCCCACA |
| | promoter (na) | GTCCCCGAGAAGTTGGGGGGAGGGGTCGGCAATTGAACCGGTGCCTA |
| | | GAGAAGGTGGCGCGGGGTAAACTGGGAAAGTGATGTCGTGTACTGGCT |
| | | CCGCCTTTTTCCCGAGGGTGGGGGAGAACCGTATATAAGTGCAGTAGT |
| | | CGCCGTGAACGTTCTTTTTCGCAACGGGTTTGCCGCCAGAACACAGGTA |
| | | AGTGCCGTGTGTGGTTCCCGCGGGCCTGGCCTCTTTACGGGTTATGGC |
| | | CCTTGCGTGCCTTGAATTACTTCCACCTGGCTGCAGTACGTGATTCTTG |
| | | ATCCCGAGCTTCGGGTTGGAAGTGGGTGGGAGAGTTCGAGGCCTTGCG |
| | | CTTAAGGAGCCCCTTCGCCTCGTGCTTGAGTTGAGGCCTGGCCTGGGC |
| | | GCTGGGGCCGCCGCGTGCGAATCTGGTGGCACCTTCGCGCCTGTCTC |
| | | GCTGCTTTCGATAAGTCTCTAGCCATTTAAAATTTTTGATGACCTGCTGC |
| | | GACGCTTTTTTTCTGGCAAGATAGTCTTGTAAATGCGGGCCAAGATCTG |
| | | CACACTGGTATTTCGGTTTTTGGGGCCGCGGGCGGCGACGGGGCCCG |
| | | TGCGTCCCAGCGCACATGTTCGGCGAGGCGGGGCCTGCGAGCGCGGC |
| | | CACCGAGAATCGGACGGGGGTAGTCTCAAGCTGGCCGGCCTGCTCTG |
| | | GTGCCTGGCCTCGCGCCGCCGTGTATCGCCCCGCCCTGGGCGGCAAG |
| | | GCTGGCCCGGTCGGCACCAGTTGCGTGAGCGGAAAGATGGCCGCTTC |
| | | CCGGCCCTGCTGCAGGGAGCTCAAAATGGAGGACGCGGCGCTCGGGA |
| | | GAGCGGGCGGGTGAGTCACCCACACAAAGGAAAAGGGCCTTTCCGTCC |
| | | TCAGCCGTCGCTTCATGTGACTCCACGGAGTACCGGGCGCCGTCCAGG |
| | | CACCTCGATTAGTTCTCGAGCTTTTGGAGTACGTCGTCTTTAGGTTGGG |
| | | GGGAGGGGTTTTATGCGATGGAGTTTCCCCACACTGAGTGGGTGGAGA |
| | | CTGAAGTTAGGCCAGCTTGGCACTTGATGTAATTCTCCTTGGAATTTGC |
| | | CCTTTTTGAGTTTGGATCTTGGTTCATTCTCAAGCCTCAGACAGTGGTTC |
| | | AAAGTTTTTTTCTTCCATTTCAGGTGTCGTGA |
| 1145 | Leader (aa) | MALPVTALLLPLALLLHAARP |
| 1146 | Leader (na) | ATGGCCCTGCCTGTGACAGCCCTGCTGCTGCCTCTGGCTCTGCTGCTG |
| | | CATGCCGCTAGACCC |
| 1147 | Leader (na) | ATGGCCCTCCCTGTCACCGCCCTGCTGCTTCCGCTGGCTCTTCTGCTC |
| | | CACGCCGCTCGGCCC |
| 1148 | CD8 hinge | TTTPAPRPPTPAPTIASQPLSLRPEACRPAAGGAVHTRGLDFACD |
| 1149 | CD8 hinge (na) | ACCACGACGCCAGCGCCGCGACCACCAACACCGGCGCCCACCATCGC |
| | | GTCGCAGCCCCTGTCCCTGCGCCCAGAGGCGTGCCGGCCAGCGGCGG |
| | | GGGGCGCAGTGCACACGAGGGGGCTGGACTTCGCCTGTGAT |
| 1150 | Ig4 hinge (aa) | ESKYGPPCPPCPAPEFLGGPSVFLFPPKPKDTLMISRTPEVTCVVVDVSQE |
| | | DPEVQFNWYVDGVEVHNAKTKPREEQFNSTYRVVSVLTVLHQDWLNGKE |
| | | YKCKVSNKGLPSSIEKTISKAKGQPREPQVYTLPPSQEEMTKNQVSLTCLV |
| | | KGFYPSDIAVEWESNGQPENNYKTTPPVLDSDGSFFLYSRLTVDKSRWQE |
| | | GNVFSCSVMHEALHNHYTQKSLSLSLGKM |
| 1151 | Ig4 hinge (na) | GAGAGCAAGTACGGCCCTCCCTGCCCCCCTTGCCCTGCCCCCGAGTTC |
| | | CTGGGCGGACCCAGCGTGTTCCTGTTCCCCCCCAAGCCCAAGGACACC |
| | | CTGATGATCAGCCGGACCCCCGAGGTGACCTGTGTGGTGGTGGACGTG |
| | | TCCCAGGAGGACCCCGAGGTCCAGTTCAACTGGTACGTGGACGGCGTG |
| | | GAGGTGCACAACGCCAAGACCAAGCCCCGGGAGGAGCAGTTCAATAG |
| | | CACCTACCGGGTGGTGTCCGTGCTGACCGTGCTGCACCAGGACTGGCT |
| | | GAACGGCAAGGAATACAAGTGTAAGGTGTCCAACAAGGGCCTGCCCAG |
| | | CAGCATCGAGAAAACCATCAGCAAGGCCAAGGGCCAGCCTCGGGAGC |
| | | CCCAGGTGTACACCCTGCCCCCTAGCCAAGAGGAGATGACCAAGAACC |
| | | AGGTGTCCCTGACCTGCCTGGTGAAGGGCTTCTACCCCAGCGACATCG |
| | | CCGTGGAGTGGGAGAGCAACGGCCAGCCCGAGAACAACTACAAGACC |
| | | ACCCCCCCTGTGCTGGACAGCGACGGCAGCTTCTTCCTGTACAGCCGG |
| | | CTGACCGTGGACAAGAGCCGGTGGCAGGAGGGCAACGTCTTTAGCTGC |
| | | TCCGTGATGCACGAGGCCCTGCACAACCACTACACCCAGAAGAGCCTG |
| | | AGCCTGTCCCTGGGCAAGATG |
| 1152 | IgD hinge (aa) | RWPESPKAQASSVPTAQPQAEGSLAKATTAPATTRNTGRGGEEKKKEKEK |
| | | EEQEERETKTPECPSHTQPLGVYLLTPAVQDLWLRDKATFTCFVVGSDLK |
| | | DAHLTWEVAGKVPTGGVEEGLLERHSNGSQSQHSRLTLPRSLWNAGTSV |
| | | TCTLNHPSLPPQRLMALREPAAQAPVKLSLNLLASSDPPEAASWLLCEVSG |
| | | FSPPNILLMWLEDQREVNTSGFAPARPPPQPGSTTFWAWSVLRVPAPPSP |
| | | QPATYTCVVSHEDSRTLLNASRSLEVSYVTDH |
| 1153 | IgD hinge (na) | AGGTGGCCCGAAAGTCCCAAGGCCCAGGCATCTAGTGTTCCTACTGCA |
| | | CAGCCCCAGGCAGAAGGCAGCCTAGCCAAAGCTACTACTGCACCTGCC |
| | | ACTACGCGCAATACTGGCCGTGGCGGGGAGGAGAAGAAAAAGGAGAA |
| | | AGAGAAAGAAGAACAGGAAGAGAGGGAGACCAAGACCCCTGAATGTCC |
| | | ATCCCATACCCAGCCGCTGGGCGTCTATCTCTTGACTCCCGCAGTACAG |
| | | GACTTGTGGCTTAGAGATAAGGCCACCTTTACATGTTTCGTCGTGGGCT |
| | | CTGACCTGAAGGATGCCCATTTGACTTGGGAGGTTGCCGGAAAGGTAC |
| | | CCACAGGGGGGGTTGAGGAAGGGTTGCTGGAGCGCCATTCCAATGGC |
| | | TCTCAGAGCCAGCACTCAAGACTCACCCTTCCGAGATCCCTGTGGAAC |
| | | GCCGGGACCTCTGTCACATGTACTCTAAATCATCCTAGCCTGCCCCCAC |
| | | AGCGTCTGATGGCCCTTAGAGAGCCAGCCGCCCAGGCACCAGTTAAGC |
| | | TTAGCCTGAATCTGCTCGCCAGTAGTGATCCCCCAGAGGCCGCCAGCT |
| | | GGCTCTTATGCGAAGTGTCCGGCTTTAGCCCGCCCAACATCTTGCTCAT |
| | | GTGGCTGGAGGACCAGCGAGAAGTGAACACCAGCGGCTTCGCTCCAG |
| | | CCCGGCCCCCACCCCAGCCGGGTTCTACCACATTCTGGGCCTGGAGTG |
| | | TCTTAAGGGTCCCAGCACCACCTAGCCCCCAGCCAGCCACATACACCT |
| | | GTGTTGTGTCCCATGAAGATAGCAGGACCCTGCTAAATGCTTCTAGGAG |
| | | TCTGGAGGTTTCCTACGTGACTGACCATT |
| 1154 | CD8 | IYIWAPLAGTCGVLLLSLVITLYC |
| | Transmembrane | |
| | (aa) | |
| 1155 | CD8 | ATCTACATCTGGGCGCCCTTGGCCGGGACTTGTGGGGTCCTTCTCCTG |
| | Transmembrane | TCACTGGTTATCACCCTTTACTGC |
| | (na) | |
| 1156 | 4-1BB | KRGRKKLLYIFKQPFMRPVQTTQEEDGCSCRFPEEEEGGCEL |
| | intracellular | |
| | domain (aa) | |
| 1157 | 4-1BB | AAACGGGGCAGAAAGAAACTCCTGTATATATTCAAACAACCATTTATGA |
| | intracellular | GACCAGTACAAACTACTCAAGAGGAAGATGGCTGTAGCTGCCGATTTCC |
| | domain (na) | AGAAGAAGAAGAAGGAGGATGTGAACTG |
| 1158 | CD27 (aa) | QRRKYRSNKGESPVEPAEPCRYSCPREEEGSTIPIQEDYRKPEPACSP |
| 1159 | CD27 (na) | AGGAGTAAGAGGAGCAGGCTCCTGCACAGTGACTACATGAACATGACT |
| | | CCCCGCCGCCCCGGGCCCACCCGCAAGCATTACCAGCCCTATGCCCC |
| | | ACCACGCGACTTCGCAGCCTATCGCTCC |
| 1160 | CD3-zeta (aa) | RVKFSRSADAPAYKQGQNQLYNELNLGRREEYDVLDKRRGRDPEMGGKP |
| | (Q/K mutant) | RRKNPQEGLYNELQKDKMAEAYSEIGMKGERRRGKGHDGLYQGLSTATK |
| | | DTYDALHMQALPPR |
| 1161 | CD3-zeta (na) | AGAGTGAAGTTCAGCAGGAGCGCAGACGCCCCCGCGTACAAGCAGGG |
| | (Q/K mutant) | CCAGAACCAGCTCTATAACGAGCTCAATCTAGGACGAAGAGAGGAGTA |
| | | CGATGTTTTGGACAAGAGACGTGGCCGGGACCCTGAGATGGGGGGAAA |
| | | GCCGAGAAGGAAGAACCCTCAGGAAGGCCTGTACAATGAACTGCAGAA |
| | | AGATAAGATGGCGGAGGCCTACAGTGAGATTGGGATGAAAGGCGAGCG |
| | | CCGGAGGGGCAAGGGGCACGATGGCCTTTACCAGGGTCTCAGTACAG |
| | | CCACCAAGGACACCTACGACGCCCTTCACATGCAGGCCCTGCCCCCTC |
| | | GC |
| 1162 | CD3-zeta (aa) | RVKFSRSADAPAYQQGQNQLYNELNLGRREEYDVLDKRRGRDPEMGGKP |
| | (NCBI | RRKNPQEGLYNELQKDKMAEAYSEIGMKGERRRGKGHDGLYQGLSTATK |
| | Reference | DTYDALHMQALPPR |
| | Sequence | |
| | NM_000734.3) | |
| 1163 | CD3-zeta (na) | AGAGTGAAGTTCAGCAGGAGCGCAGACGCCCCCGCGTACCAGCAGGG |
| | (NCBI | CCAGAACCAGCTCTATAACGAGCTCAATCTAGGACGAAGAGAGGAGTA |
| | Reference | CGATGTTTTGGACAAGAGACGTGGCCGGGACCCTGAGATGGGGGGAAA |
| | Sequence | GCCGAGAAGGAAGAACCCTCAGGAAGGCCTGTACAATGAACTGCAGAA |
| | NM_000734.3) | AGATAAGATGGCGGAGGCCTACAGTGAGATTGGGATGAAAGGCGAGCG |
| | | CCGGAGGGGCAAGGGGCACGATGGCCTTTACCAGGGTCTCAGTACAG |
| | | CCACCAAGGACACCTACGACGCCCTTCACATGCAGGCCCTGCCCCCTC |
| | | GC |
| 1164 | CD28 | RSKRSRLLHSDYMNMTPRRPGPTRKHYQPYAPPRDFAAYRS |
| | Intracellular | |
| | domain (amino | |
| | acid sequence) | |
| 1165 | CD28 | AGGAGTAAGAGGAGCAGGCTCCTGCACAGTGACTACATGAACATGACT |
| | Intracellular | CCCCGCCGCCCCGGGCCCACCCGCAAGCATTACCAGCCCTATGCCCC |
| | domain | ACCACGCGACTTCGCAGCCTATCGCTCC |
| | (nucleotide | |
| | sequence) | |
| 1166 | ICOS | TKKKYSSSVHDPNGEYMFMRAVNTAKKSRLTDVTL |
| | Intracellular | |
| | domain (amino | |
| | acid sequence) | |
| 1167 | ICOS | ACAAAAAAGAAGTATTCATCCAGTGTGCACGACCCTAACGGTGAATACA |
| | Intracellular | TGTTCATGAGAGCAGTGAACACAGCCAAAAAATCCAGACTCACAGATGT |
| | domain | GACCCTA |
| | (nucleotide | |
| | sequence) | |
| 1168 | GS hinge/linker | GGGGSGGGGS |
| 1169 | GS hinge/linker | GGTGGCGGAGGTTCTGGAGGTGGAGGTTCC |
| | (na) | |
| 1170 | GS hinge/linker | GGTGGCGGAGGTTCTGGAGGTGGGGGTTCC |
| | (na) | |
| 1171 | linker | GGGGS |
| 1172 | linker | (Gly-Gly-Gly-Gly-Ser)n, where n = 1-6, for example, |
| | | GGGGSGGGGS GGGGSGGGGS GGGGSGGGGS |
| 1173 | linker | GGGGSGGGGSGGGGSGGGGS |
| 1174 | linker | GGGGSGGGGSGGGGS |
| 1175 | linker | GGGS |
| 1176 | linker | (Gly-Gly-Gly-Ser)n where n is a positive integer equal to |
| | | or greater than 1 |
| 1177 | linker | (Gly-Gly-Gly-Ser)n, where n = 1-10, for example, GGGSGGGSGG |
| | | GSGGGSGGGS GGGSGGGSGG GSGGGSGGGS |
| 1178 | linker | GSTSGSGKPGSGEGSTKG |

[0649] In certain aspects, the CAR molecule comprises a CD19 CAR molecule described in US-2015-0283178-A1, for example a CD19 CAR comprising an amino acid, or encoded by a nucleotide sequence, described in US-2015-0283178-A1, incorporated herein by reference. In some embodiments, the CAR molecule comprises the sequence of SEQ ID NO: 149 or SEQ ID NO:97. In certain aspects, the CAR molecule comprises the sequence of SEQ ID NO: 1162 or SEQ ID NO: 1160.

[0650] In further aspects, the CAR molecule comprise an amino acid sequence, or are encoded by nucleic acid constructs, described in International Application WO2014/153270, certain sequences of which are reproduced herein.

[0651] The sequences of the humanized scFv fragments (SEQ ID NOS: 96-107) are provided below in Table 16.

TABLE 16
Humanized CD19 CAR Constructs

| | | |
|---|---|---|
| | SEQ ID | |
| Name | NO | Sequence |

CAR 1

| | | |
|---|---|---|
| CAR1 | 96 | EIVMTQSPATLSLSPGERATLSCRASQDISKYLNWYQQKPGQAPRL |
| scFv | | LIYHTSRLHSGIPARFSGSGSGTDYTLTISSLQPEDFAVYFCQQGNT |
| domain | | LPYTFGQGTKLEIKGGGGSGGGGSGGGGSQVQLQESGPGLVKPS |
| | | ETLSLTCTVSGVSLPDYGVSWIRQPPGKGLEWIGVIWGSETTYYSS |
| | | SLKSRVTISKDNSKNQVSLKLSSVTAADTAVYYCAKHYYYGGSYAM |
| | | DYWGQGTLVTVSS |
| 103101 | 151 | atggccctccctgtcaccgccctgctgcttccgctggctcttctgctccacgccgctcggcccgaa |
| CAR1 | | attgtgatgacccagtcacccgccactcttagcctttcacccggtgagcgcgcaaccctgtcttgc |
| Soluble | | agagcctcccaagacatctcaaaataccttaattggtatcaacagaagcccggacaggctcct |
| scFv-nt | | cgccttctgatctaccacaccagccggctccattctggaatccctgccaggttcagcggtagcgg |
| | | atctgggaccgactacaccctcactatcagctcactgcagccagaggacttcgctgtctatttctg |
| | | tcagcaagggaacaccctgccctacacctttggacagggcaccaagctcgagattaaaggtg |
| | | gaggtggcagcggaggaggtgggtccggcggtggaggaagccaggtccaactccaagaa |
| | | agcggaccgggtcttgtgaagccatcagaaactctttcactgacttgtactgtgagcggagtgtct |
| | | ctccccgattacggggtgtcttggatcagacagccaccggggaagggtctggaatggattgga |
| | | gtgatttggggctctgagactacttactactcttcatccctcaagtcacgcgtcaccatctcaaagg |
| | | acaactctaagaatcaggtgtcactgaaactgtcatctgtgaccgcagccgacaccgccgtgta |
| | | ctattgcgctaagcattactattatggcgggagctacgcaatggattactggggacagggtactc |
| | | tggtcaccgtgtccagccaccaccatcatcaccatcaccat |
| 103101 | 163 | MALPVTALLLPLALLLHAARPeivmtqspatlslspgeratlscrasqdiskylnwy |
| CAR1 | | qqkpgqaprlliyhtsrlhsgiparfsgsgsgtdytltisslqpedfavyfcqqgntlpytfgqgtklei |
| Soluble | | kggggsggggsggggsqvqlqesgpglvkpsetlsltctvsgvslpdygvswirqppgkglew |
| scFv-aa | | igviwgsettyyssslksrvtiskdnsknqvslklssvtaadtavyycakhyyyggsyamdywg |
| | | qgtlvtvsshhhhhhhh |
| 104875 | 175 | atggccctccctgtcaccgccctgctgcttccgctggctcttctgctccacgccgctcggcccgaa |
| CAR 1- | | attgtgatgacccagtcacccgccactcttagcctttcacccggtgagcgcgcaaccctgtcttgc |
| Full-nt | | agagcctcccaagacatctcaaaataccttaattggtatcaacagaagcccggacaggctcct |
| | | cgccttctgatctaccacaccagccggctccattctggaatccctgccaggttcagcggtagcgg |
| | | atctgggaccgactacaccctcactatcagctcactgcagccagaggacttcgctgtctatttctg |
| | | tcagcaagggaacaccctgccctacacctttggacagggcaccaagctcgagattaaaggtg |
| | | gaggtggcagcggaggaggtgggtccggcggtggaggaagccaggtccaactccaagaa |
| | | agcggaccgggtcttgtgaagccatcagaaactctttcactgacttgtactgtgagcggagtgtct |
| | | ctccccgattacggggtgtcttggatcagacagccaccggggaagggtctggaatggattgga |
| | | gtgatttggggctctgagactacttactactcttcatccctcaagtcacgcgtcaccatctcaaagg |
| | | acaactctaagaatcaggtgtcactgaaactgtcatctgtgaccgcagccgacaccgccgtgta |
| | | ctattgcgctaagcattactattatggcgggagctacgcaatggattactggggacagggtactc |
| | | tggtcaccgtgtccagcaccactaccccagcaccgaggccacccaccccggctcctaccatc |
| | | gcctcccagcctctgtccctgcgtccggaggcatgtagacccgcagctggtggggccgtgcat |
| | | acccggggtcttgacttcgcctgcgatatctacatttgggcccctctggctggtacttgcggggtcc |
| | | tgctgctttcactcgtgatcactctttactgtaagcgcggtcggaagaagctgctgtacatctttaag |
| | | caacccttcatgaggcctgtgcagactactcaagaggaggacggctgttcatgccggttcccag |
| | | aggaggaggaaggcggctgcgaactgcgcgtgaaattcagccgcagcgcagatgctccag |
| | | cctacaagcaggggcagaaccagctctacaacgaactcaatcttggtcggagagaggagta |
| | | cgacgtgctggacaagcggagaggacgggacccagaaatgggcgggaagccgcgcaga |
| | | aagaatccccaagagggcctgtacaacgagctccaaaaggataagatggcagaagcctata |
| | | gcgagattggtatgaaaggggaacgcagaagaggcaaaggccacgacggactgtaccag |
| | | ggactcagcaccgccaccaaggacacctatgacgctcttcacatgcaggccctgccgcctcg |
| | | g |
| 104875 | 122 | MALPVTALLLPLALLLHAARPeivmtqspatlslspgeratlscrasqdiskylnwy |
| CAR 1- | | qqkpgqaprlliyhtsrlhsgiparfsgsgsgtdytltisslqpedfavyfcqqgntlpytfgqgtkl |
| Full-aa | | eikggggsggggsggggsqvqlqesgpglvkpsetlsltctvsgvslpdygvswirqppgkgl |
| | | ewigviwgsettyyssslksrvtiskdnsknqvslklssvtaadtavyycakhyyyggsya |
| | | mdywgqgtlvtvsstttpaprpptpaptiasqplslrpeacrpaaggavhtrgldfacdiyiwapl |
| | | agtcgvlllslvitlyckrgrkkllyifkqpfmrpvqttqeedgcscrfpeeeeggcelrvkfsrsada |
| | | paykqgqnqlynelnlgrreeydvldkrrgrdpemggkprrknpqeglynelqkdkmaeays |
| | | eigmkgerrrgkghdglyqglstatkdtydalhmqalppr |

CAR 2

| | | |
|---|---|---|
| CAR2 | 97 | eivmtqspatlslspgeratlscrasqdiskylnwyqqkpgqaprlliyhtsrlhsgiparfsgsgs |
| scFv | | gtdytltisslqpedfavyfcqqgntlpytfgqgtkleikggggsggggsggggsqvqlqesgpgl |
| domain | | vkpsetlsltctvsgvslpdygvswirqppgkglewigviwgsettyyqsslksrvtiskdnsknq |
| | | vslklssvtaadtavyycakhyyyggsyamdywgqgtlvtvss |
| 103102 | 152 | atggccctccctgtcaccgccctgctgcttccgctggctcttctgctccacgccgctcggcccgaa |
| CAR2- | | attgtgatgacccagtcacccgccactcttagcctttcacccggtgagcgcgcaaccctgtcttgc |
| Soluble | | agagcctcccaagacatctcaaaataccttaattggtatcaacagaagcccggacaggctcct |
| scFv-nt | | cgccttctgatctaccacaccagccggctccattctggaatccctgccaggttcagcggtagcgg |
| | | atctgggaccgactacaccctcactatcagctcactgcagccagaggacttcgctgtctatttctg |
| | | tcagcaagggaacaccctgccctacacctttggacagggcaccaagctcgagattaaaggtg |
| | | gaggtggcagcggaggaggtgggtccggcggtggaggaagccaggtccaactccaagaa |
| | | agcggaccgggtcttgtgaagccatcagaaactctttcactgacttgtactgtgagcggagtgtct |
| | | ctccccgattacggggtgtcttggatcagacagccaccggggaagggtctggaatggattgga |
| | | gtgatttggggctctgagactacttactaccaatcatccctcaagtcacgcgtcaccatctcaaag |
| | | gacaactctaagaatcaggtgtcactgaaactgtcatctgtgaccgcagccgacaccgccgtgt |
| | | actattgcgctaagcattactattatggcgggagctacgcaatggattactggggacagggtact |
| | | ctggtcaccgtgtccagccaccaccatcatcaccatcaccat |
| 103102 | 164 | MALPVTALLLPLALLLHAARPeivmtqspatlslspgeratlscrasqdiskylnwy |
| CAR2- | | qqkpgqaprlliyhtsrlhsgiparfsgsgsgtdytltisslqpedfavyfcqqgntlpytfgqgtklei |
| Soluble | | kggggggggsggggsqvqlqesgpglvkpsetlsltctvsgvslpdygvswirqppgkglew |
| scFv-aa | | igviwgsettyyqsslksrvtiskdnsknqvslklssvtaadtavyycakhyyyggsyamdywg |
| | | qgtlvtvsshhhhhhhh |
| 104876 | 176 | atggccctccctgtcaccgccctgctgcttccgctggctcttctgctccacgccgctcggcccgaa |
| CAR 2- | | attgtgatgacccagtcacccgccactcttagcctttcacccggtgagcgcgcaaccctgtcttgc |
| Full-nt | | agagcctcccaagacatctcaaaataccttaattggtatcaacagaagcccggacaggctcct |
| (also | | cgccttctgatctaccacaccagccggctccattctggaatccctgccaggttcagcggtagcgg |
| referred to | | atctgggaccgactacaccctcactatcagctcactgcagccagaggacttcgctgtctatttctg |
| herein as | | tcagcaagggaacaccctgccctacacctttggacagggcaccaagctcgagattaaaggtg |
| CTL119 | | gaggtggcagcggaggaggtgggtccggcggtggaggaagccaggtccaactccaagaa |
| nucleotide | | agcggaccgggtcttgtgaagccatcagaaactctttcactgacttgtactgtgagcggagtgtct |
| sequence) | | ctccccgattacggggtgtcttggatcagacagccaccggggaagggtctggaatggattgga |
| | | gtgatttggggctctgagactacttactaccaatcatccctcaagtcacgcgtcaccatctcaaag |
| | | gacaactctaagaatcaggtgtcactgaaactgtcatctgtgaccgcagccgacaccgccgtgt |
| | | actattgcgctaagcattactattatggcgggagctacgcaatggattactggggacagggtact |
| | | ctggtcaccgtgtccagcaccactaccccagcaccgaggccacccaccccggctcctaccat |
| | | cgcctcccagcctctgtccctgcgtccggaggcatgtagacccgcagctggtggggccgtgcat |
| | | acccggggtcttgacttcgcctgcgatatctacatttgggcccctctggctggtacttgcggggtcc |
| | | tgctgctttcactcgtgatcactctttactgtaagcgcggtcggaagaagctgctgtacatctttaag |
| | | caacccttcatgaggcctgtgcagactactcaagaggaggacggctgttcatgccggttcccag |
| | | aggaggaggaaggcggctgcgaactgcgcgtgaaattcagccgcagcgcagatgctccag |
| | | cctacaagcaggggcagaaccagctctacaacgaactcaatcttggtcggagagaggagta |
| | | cgacgtgctggacaagcggagaggacgggacccagaaatgggcgggaagccgcgcaga |
| | | aagaatccccaagagggcctgtacaacgagctccaaaaggataagatggcagaagcctata |
| | | gcgagattggtatgaaaggggaacgcagaagaggcaaaggccacgacggactgtaccag |
| | | ggactcagcaccgccaccaaggacacctatgacgctcttcacatgcaggccctgccgcctcg |
| | | g |
| 104876 | 123 | MALPVTALLLPLALLLHAARPeivmtqspatlslspgeratlscrasqdiskylnwy |
| CAR 2- | | qqkpgqaprlliyhtsrlhsgiparfsgsgsgtdytltisslqpedfavyfcqqgntlpytfgqgtkl |
| Full-aa | | eikggggsggggsggggsqvqlqesgpglvkpsetlsltctvsgvslpdygvswirqppgkgl |
| (also | | ewigviwgsettyyqsslksrvtiskdnsknqvslklssvtaadtavyycakhyyyggsya |
| referred to | | mdywgqgtlvtvsstttpaprpptpaptiasqplslrpeacrpaaggavhtrgldfacdiyiwapl |
| herein as | | agtcgvlllslvitlyckrgrkkllyifkqpfmrpvqttqeedgcscrfpeeeeggcelrvkfsrsada |
| CTL119 | | paykqgqnqlynelnlgrreeydvldkrrgrdpemggkprrknpqeglynelqkdkmaeays |
| amino acid | | eigmkgerrrgkghdglyqglstatkdtydalhmqalppr |
| sequence) | | |

CAR 3

| | | |
|---|---|---|
| CAR3 | 98 | qvqlqesgpglvkpsetlsltctvsgvslpdygvswirqppgkglewigviwgsettyyssslksr |
| scFv | | vtiskdnsknqvslklssvtaadtavyycakhyyyggsyamdywgqgtlvtvssggggsggg |
| domain | | gsggggseivmtqspatlslspgeratlscrasqdiskylnwyqqkpgqaprlliyhtsrlhsgip |
| | | arfsgsgsgtdytltisslqpedfavyfcqqgntlpytfgqgtkleik |
| 103104 | 153 | atggctctgcccgtgaccgcactcctcctgccactggctctgctgcttcacgccgctcgcccaca |
| CAR 3- | | agtccagcttcaagaatcagggcctggtctggtgaagccatctgagactctgtccctcacttgca |
| Soluble | | ccgtgagcggagtgtccctcccagactacggagtgagctggattagacagcctcccggaaag |
| scFv-nt | | ggactggagtggatcggagtgatttggggtagcgaaaccacttactattcatcttccctgaagtc |
| | | acgggtcaccatttcaaaggataactcaaagaatcaagtgagcctcaagctctcatcagtcac |
| | | cgccgctgacaccgccgtgtattactgtgccaagcattactactatggagggtcctacgccatgg |
| | | actactggggccagggaactctggtcactgtgtcatctggtggaggaggtagcggaggaggc |
| | | gggagcggtggaggtggctccgaaatcgtgatgacccagagccctgcaaccctgtccctttctc |
| | | ccggggaacgggctaccctttcttgtcgggcatcacaagatatctcaaaatacctcaattggtat |
| | | caacagaagccgggacaggcccctaggcttcttatctaccacacctctcgcctgcatagcggg |
| | | attcccgcacgctttagcgggtctggaagcgggaccgactacactctgaccatctcatctctcca |
| | | gcccgaggacttcgccgtctacttctgccagcagggtaacaccctgccgtacaccttcggccag |
| | | ggcaccaagcttgagatcaaacatcaccaccatcatcaccatcac |
| 103104 | 165 | MALPVTALLLPLALLLHAARPqvqlqesgpglvkpsetlsltctvsgvslpdygvs |
| CAR 3- | | wirqppgkglewigviwgsettyyssslksrvtiskdnsknqvslklssvtaadtavyycakhyy |
| Soluble | | yggsyamdywgqgtlvtvssggggsggggsggggseivmtqspatlslspgeratlscrasq |
| scFv-aa | | diskylnwyqqkpgqaprlliyhtsrlhsgiparfsgsgsgtdytltisslqpedfavyfcqqgntlp |
| | | ytfgqgtkleikhhhhhhhh |
| 104877 | 177 | atggctctgcccgtgaccgcactcctcctgccactggctctgctgcttcacgccgctcgcccaca |
| CAR 3- | | agtccagcttcaagaatcagggcctggtctggtgaagccatctgagactctgtccctcacttgca |
| Full-nt | | ccgtgagcggagtgtccctcccagactacggagtgagctggattagacagcctcccggaaag |
| | | ggactggagtggatcggagtgatttggggtagcgaaaccacttactattcatcttccctgaagtc |
| | | acgggtcaccatttcaaaggataactcaaagaatcaagtgagcctcaagctctcatcagtcac |
| | | cgccgctgacaccgccgtgtattactgtgccaagcattactactatggagggtcctacgccatgg |
| | | actactggggccagggaactctggtcactgtgtcatctggtggaggaggtagcggaggaggc |
| | | gggagcggtggaggtggctccgaaatcgtgatgacccagagccctgcaaccctgtccctttctc |
| | | ccggggaacgggctaccctttcttgtcgggcatcacaagatatctcaaaatacctcaattggtat |
| | | caacagaagccgggacaggcccctaggcttcttatctaccacacctctcgcctgcatagcggg |
| | | attcccgcacgctttagcgggtctggaagcgggaccgactacactctgaccatctcatctctcca |
| | | gcccgaggacttcgccgtctacttctgccagcagggtaacaccctgccgtacaccttcggccag |
| | | ggcaccaagcttgagatcaaaaccactactcccgctccaaggccacccacccctgccccgac |
| | | catcgcctctcagccgctttccctgcgtccggaggcatgtagacccgcagctggtggggccgtg |
| | | catacccggggtcttgacttcgcctgcgatatctacatttgggcccctctggctggtacttgcgggg |
| | | tcctgctgctttcactcgtgatcactctttactgtaagcgcggtcggaagaagctgctgtacatcttt |
| | | aagcaacccttcatgaggcctgtgcagactactcaagaggaggacggctgttcatgccggttc |
| | | ccagaggaggaggaaggcggctgcgaactgcgcgtgaaattcagccgcagcgcagatgct |
| | | ccagcctacaagcaggggcagaaccagctctacaacgaactcaatcttggtcggagagagg |
| | | agtacgacgtgctggacaagcggagaggacgggacccagaaatggggggaagccgcgc |
| | | agaaagaatccccaagagggcctgtacaacgagctccaaaaggataagatggcagaagcc |
| | | tatagcgagattggtatgaaaggggaacgcagaagaggcaaaggccacgacggactgtac |
| | | cagggactcagcaccgccaccaaggacacctatgacgctcttcacatgcaggccctgccgcc |
| | | tcgg |
| 104877 | 124 | MALPVTALLLPLALLLHAARPqvqlqesgpglvkpsetlsltctvsgvslpdygvswi |
| CAR 3- | | rqppgkglewigviwgsettyyssslksrvtiskdnsknqvslklssvtaadtavyycakhyy |
| Full-aa | | yggsyamdywgqgtlvtvssggggsggggsggggseivmtqspatlslspgeratlscras |
| | | qdiskylnwyqqkpgqaprlliyhtsrlhsgiparfsgsgsgtdytltisslqpedfavyfcqqg |
| | | ntlpytfgqgtkleiktttpaprpptpaptiasqplsIrpeacrpaaggavhtrgldfacdiyiwapl |
| | | agtcgvlllslvitlyckrgrkkllyifkqpfmrpvqttqeedgcscrfpeeeeggcelrvkfsrsada |
| | | paykqgqnqlynelnlgrreeydvldkrrgrdpemggkprrknpqeglynelqkdkmaeays |
| | | eigmkgerrrgkghdglyqglstatkdtydalhmqalppr |

CAR 4

| | | |
|---|---|---|
| CAR4 | 99 | qvqlqesgpglvkpsetlsltctvsgvslpdygvswirqppgkglewigviwgsettyyqsslksr |
| scFv | | vtiskdnsknqvslklssvtaadtavyycakhyyyggsyamdywgqgtlvtvssggggsggg |
| domain | | gsggggseivmtqspatlslspgeratlscrasqdiskyInwyqqkpgqaprlliyhtsrlhsgip |
| | | arfsgsgsgtdytltisslqpedfavyfcqqgntlpytfgqgtkleik |
| 103106 | 154 | atggctctgcccgtgaccgcactcctcctgccactggctctgctgcttcacgccgctcgcccaca |
| CAR4- | | agtccagcttcaagaatcagggcctggtctggtgaagccatctgagactctgtccctcacttgca |
| Soluble | | ccgtgagcggagtgtccctcccagactacggagtgagctggattagacagcctcccggaaag |
| scFv-nt | | ggactggagtggatcggagtgatttggggtagcgaaaccacttactatcaatcttccctgaagtc |
| | | acgggtcaccatttcaaaggataactcaaagaatcaagtgagcctcaagctctcatcagtcac |
| | | cgccgctgacaccgccgtgtattactgtgccaagcattactactatggagggtcctacgccatgg |
| | | actactggggccagggaactctggtcactgtgtcatctggtggaggaggtagcggaggaggc |
| | | gggagcggtggaggtggctccgaaatcgtgatgacccagagccctgcaaccctgtccctttctc |
| | | ccggggaacgggctaccctttcttgtcgggcatcacaagatatctcaaaatacctcaattggtat |
| | | caacagaagccgggacaggcccctaggcttcttatctaccacacctctcgcctgcatagcggg |
| | | attcccgcacgctttagcgggtctggaagcgggaccgactacactctgaccatctcatctctcca |
| | | gcccgaggacttcgccgtctacttctgccagcagggtaacaccctgccgtacaccttcggccag |
| | | ggcaccaagcttgagatcaaacatcaccaccatcatcaccatcac |
| 103106 | 166 | MALPVTALLLPLALLLHAARPqvqlqesgpglvkpsetlsltctvsgvslpdygvs |
| CAR4- | | wirqppgkglewigviwgsettyyqsslksrvtiskdnsknqvslklssvtaadtavyycakhyy |
| Soluble | | yggsyamdywgqgtlvtvssggggsggggsggggseivmtqspatlslspgeratlscrasq |
| scFv-aa | | diskylnwyqqkpgqaprlliyhtsrlhsgiparfsgsgsgtdytltisslqpedfavyfcqqgntlp |
| | | ytfgqgtkleikhhhhhhhh |
| 104878 | 178 | atggctctgcccgtgaccgcactcctcctgccactggctctgctgcttcacgccgctcgcccaca |
| CAR 4- | | agtccagcttcaagaatcagggcctggtctggtgaagccatctgagactctgtccctcacttgca |
| Full-nt | | ccgtgagcggagtgtccccccagactacggagtgagctggattagacagcctcccggaaag |
| | | ggactggagtggatcggagtgatttggggtagcgaaaccacttactatcaatcttccctgaagtc |
| | | acgggtcaccatttcaaaggataactcaaagaatcaagtgagcctcaagctctcatcagtcac |
| | | cgccgctgacaccgccgtgtattactgtgccaagcattactactatggagggtcctacgccatgg |
| | | actactggggccagggaactctggtcactgtgtcatctggtggaggaggtagcggaggaggc |
| | | gggagcggtggaggtggctccgaaatcgtgatgacccagagccctgcaaccctgtccctttctc |
| | | ccggggaacgggctaccctttcttgtcgggcatcacaagatatctcaaaatacctcaattggtat |
| | | caacagaagccgggacaggcccctaggcttcttatctaccacacctctcgcctgcatagcggg |
| | | attcccgcacgctttagcgggtctggaagcgggaccgactacactctgaccatctcatctctcca |
| | | gcccgaggacttcgccgtctacttctgccagcagggtaacaccctgccgtacaccttcggccag |
| | | ggcaccaagcttgagatcaaaaccactactcccgctccaaggccacccacccctgccccgac |
| | | catcgcctctcagccgctttccctgcgtccggaggcatgtagacccgcagctggtggggccgtg |
| | | catacccggggtcttgacttcgcctgcgatatctacatttgggcccctctggctggtacttgcgggg |
| | | tcctgctgctttcactcgtgatcactctttactgtaagcgcggtcggaagaagctgctgtacatcttt |
| | | aagcaacccttcatgaggcctgtgcagactactcaagaggaggacggctgttcatgccggttc |
| | | ccagaggaggaggaaggcggctgcgaactgcgcgtgaaattcagccgcagcgcagatgct |
| | | ccagcctacaagcaggggcagaaccagctctacaacgaactcaatcttggtcggagagagg |
| | | agtacgacgtgctggacaagcggagaggacgggacccagaaatggggggaagccgcgc |
| | | agaaagaatccccaagagggcctgtacaacgagctccaaaaggataagatggcagaagcc |
| | | tatagcgagattggtatgaaaggggaacgcagaagaggcaaaggccacgacggactgtac |
| | | cagggactcagcaccgccaccaaggacacctatgacgctcttcacatgcaggccctgccgcc |
| | | tcgg |
| 104878 | 125 | MALPVTALLLPLALLLHAARPqvqlqesgpglvkpsetlsltctvsgvslpdygvswi |
| CAR 4- | | rqppgkglewigviwgsettyyqsslksrvtiskdnsknqvslklssvtaadtavyycakhyy |
| Full-aa | | yggsyamdywgqgtlvtvssggggsggggsggggseivmtqspatlslspgeratlscras |
| | | qdiskylnwyqqkpgqaprlliyhtsrlhsgiparfsgsgsgtdytltisslqpedfavyfcqqg |
| | | ntlpytfgqgtkleiktttpaprpptpaptiasqplsIrpeacrpaaggavhtrgldfacdiyiwapl |
| | | agtcgvlllslvitlyckrgrkkllyifkqpfmrpvqttqeedgcscrfpeeeeggcelrvkfsrsada |
| | | paykqgqnqlynelnlgrreeydvldkrrgrdpemggkprrknpqeglynelqkdkmaeays |
| | | eigmkgerrrgkghdglyqglstatkdtydalhmqalppr |

CAR 5

| | | |
|---|---|---|
| CAR5 | 100 | eivmtqspatlslspgeratlscrasqdiskylnwyqqkpgqaprlliyhtsrlhsgiparfsgsgs |
| scFv | | gtdytltisslqpedfavyfcqqgntlpytfgqgtkleikggggsggggsggggsggggsqvqlq |
| domain | | esgpglvkpsetlsltctvsgvslpdygvswirqppgkglewigviwgsettyyssslksrvtiskd |
| | | nsknqvslklssvtaadtavyycakhyyyggsyamdywgqgtlvtvss |
| 99789 | 155 | atggccctcccagtgaccgctctgctgctgcctctcgcacttcttctccatgccgctcggcctgag |
| CAR5- | | atcgtcatgacccaaagccccgctaccctgtccctgtcacccggcgagagggcaaccctttcat |
| Soluble | | gcagggccagccaggacatttctaagtacctcaactggtatcagcagaagccagggcaggct |
| scFv-nt | | cctcgcctgctgatctaccacaccagccgcctccacagcggtatccccgccagattttccggga |
| | | gcgggtctggaaccgactacaccctcaccatctcttctctgcagcccgaggatttcgccgtctattt |
| | | ctgccagcaggggaatactctgccgtacaccttcggtcaaggtaccaagctggaaatcaagg |
| | | gaggcggaggatcaggcggtggcggaagcggaggaggtggctccggaggaggaggttcc |
| | | caagtgcagcttcaagaatcaggacccggacttgtgaagccatcagaaaccctctccctgactt |
| | | gtaccgtgtccggtgtgagcctccccgactacggagtctcttggattcgccagcctccggggaa |
| | | gggtcttgaatggattggggtgatttggggatcagagactacttactactcttcatcacttaagtca |
| | | cgggtcaccatcagcaaagataatagcaagaaccaagtgtcacttaagctgtcatctgtgacc |
| | | gccgctgacaccgccgtgtactattgtgccaaacattactattacggagggtcttatgctatggac |
| | | tactggggacaggggaccctggtgactgtctctagccatcaccatcaccaccatcatcac |
| 99789 | 167 | MALPVTALLLPLALLLHAARPeivmtqspatlslspgeratlscrasqdiskylnwy |
| CAR5- | | qqkpgqaprlliyhtsrlhsgiparfsgsgsgtdytltisslqpedfavyfcqqgntlpytfgqgtklei |
| Soluble | | kggggsggggsggggsggggsqvqlqesgpglvkpsetlsltctvsgvslpdygvswirqpp |
| scFv-aa | | gkglewigviwgsettyyssslksrvtiskdnsknqvslklssvtaadtavyycakhyyyggsya |
| | | mdywgqgtlvtvsshhhhhhhh |
| 104879 | 179 | atggccctccctgtcaccgccctgctgcttccgctggctcttctgctccacgccgctcggcccgaa |
| CAR 5- | | attgtgatgacccagtcacccgccactcttagcctttcacccggtgagcgcgcaaccctgtcttgc |
| Full-nt | | agagcctcccaagacatctcaaaataccttaattggtatcaacagaagcccggacaggctcct |
| | | cgccttctgatctaccacaccagccggctccattctggaatccctgccaggttcagcggtagcgg |
| | | atctgggaccgactacaccctcactatcagctcactgcagccagaggacttcgctgtctatttctg |
| | | tcagcaagggaacaccctgccctacacctttggacagggcaccaagctcgagattaaaggtg |
| | | gaggtggcagcggaggaggtgggtccggcggtggaggaagcggcggaggcgggagcca |
| | | ggtccaactccaagaaagcggaccgggtcttgtgaagccatcagaaactctttcactgacttgt |
| | | actgtgagcggagtgtctctccccgattacggggtgtcttggatcagacagccaccggggaag |
| | | ggtctggaatggattggagtgatttggggctctgagactacttactactcttcatccctcaagtcac |
| | | gcgtcaccatctcaaaggacaactctaagaatcaggtgtcactgaaactgtcatctgtgaccgc |
| | | agccgacaccgccgtgtactattgcgctaagcattactattatggcgggagctacgcaatggatt |
| | | actggggacagggtactctggtcaccgtgtccagcaccactaccccagcaccgaggccaccc |
| | | accccggctcctaccatcgcctcccagcctctgtccctgcgtccggaggcatgtagacccgcag |
| | | ctggtggggccgtgcatacccggggtcttgacttcgcctgcgatatctacatttgggcccctctgg |
| | | ctggtacttgcggggtcctgctgctttcactcgtgatcactctttactgtaagcgcggtcggaagaa |
| | | gctgctgtacatctttaagcaacccttcatgaggcctgtgcagactactcaagaggaggacggc |
| | | tgttcatgccggttcccagaggaggaggaaggcggctgcgaactgcgcgtgaaattcagccg |
| | | cagcgcagatgctccagcctacaagcaggggcagaaccagctctacaacgaactcaatcttg |
| | | gtcggagagaggagtacgacgtgctggacaagcggagaggacgggacccagaaatgggc |
| | | gggaagccgcgcagaaagaatccccaagagggcctgtacaacgagctccaaaaggataa |
| | | gatggcagaagcctatagcgagattggtatgaaaggggaacgcagaagaggcaaaggcca |
| | | cgacggactgtaccagggactcagcaccgccaccaaggacacctatgacgctcttcacatgc |
| | | aggccctgccgcctcgg |
| 104879 | 126 | MALPVTALLLPLALLLHAARPeivmtqspatlslspgeratlscrasqdiskylnwy |
| CAR 5- | | qqkpgqaprlliyhtsrlhsgiparfsgsgsgtdytltisslqpedfavyfcqqgntlpytfgqgtkl |
| Full-aa | | eikggggsggggsggggggggsqvqlqesgpglvkpsetlsltctvsgvslpdygvswirq |
| | | ppgkglewigviwgsettyyssslksrvtiskdnsknqvslklssvtaadtavyycakhyyyg |
| | | gsyamdywgqgtlvtvsstttpaprpptpaptiasqplslrpeacrpaaggavhtrgldfacdiy |
| | | iwaplagtcgvlllslvitlyckrgrkkllyifkqpfmrpvqttqeedgcscrfpeeeeggcelrvkfsr |
| | | sadapaykqgqnqlynelnlgrreeydvldkrrgrdpemggkprrknpqeglynelqkdkma |
| | | eayseigmkgerrrgkghdglyqglstatkdtydalhmqalppr |

CAR 6

| | | |
|---|---|---|
| CAR6 | 101 | eivmtqspatlslspgeratlscrasqdiskylnwyqqkpgqaprlliyhtsrlhsgiparfsgsgs |
| scFv | | gtdytltisslqpedfavyfcqqgntlpytfgqgtkleikggggggggsggggsggggsqvqlq |
| domain | | esgpglvkpsetlsltctvsgvslpdygvswirqppgkglewigviwgsettyyqsslksrvtiskd |
| | | nsknqvslklssvtaadtavyycakhyyyggsyamdywgqgtlvtvss |
| 99790 | 156 | atggccctcccagtgaccgctctgctgctgcctctcgcacttcttctccatgccgctcggcctgag |
| CAR6- | | atcgtcatgacccaaagccccgctaccctgtccctgtcacccggcgagagggcaaccctttcat |
| Soluble | | gcagggccagccaggacatttctaagtacctcaactggtatcagcagaagccagggcaggct |
| scFv-nt | | cctcgcctgctgatctaccacaccagccgcctccacagcggtatccccgccagattttccggga |
| | | gcgggtctggaaccgactacaccctcaccatctcttctctgcagcccgaggatttcgccgtctattt |
| | | ctgccagcaggggaatactctgccgtacaccttcggtcaaggtaccaagctggaaatcaagg |
| | | gaggcggaggatcaggcggtggcggaagcggaggaggtggctccggaggaggaggttcc |
| | | caagtgcagcttcaagaatcaggacccggacttgtgaagccatcagaaaccctctccctgactt |
| | | gtaccgtgtccggtgtgagcctccccgactacggagtctcttggattcgccagcctccggggaa |
| | | gggtcttgaatggattggggtgatttggggatcagagactacttactaccagtcatcacttaagtc |
| | | acgggtcaccatcagcaaagataatagcaagaaccaagtgtcacttaagctgtcatctgtgac |
| | | cgccgctgacaccgccgtgtactattgtgccaaacattactattacggagggtcttatgctatgga |
| | | ctactggggacaggggaccctggtgactgtctctagccatcaccatcaccaccatcatcac |
| 99790 | 168 | MALPVTALLLPLALLLHAARPeivmtqspatlslspgeratlscrasqdiskylnwy |
| CAR6- | | qqkpgqaprlliyhtsrlhsgiparfsgsgsgtdytltisslqpedfavyfcqqgntlpytfgqgtklei |
| Soluble | | kggggsggggggggsggggsqvqlqesgpglvkpsetlsltctvsgvslpdygvswirqpp |
| scFv-aa | | gkglewigviwgsettyyqsslksrvtiskdnsknqvslklssvtaadtavyycakhyyyggsya |
| | | mdywgqgtlvtvsshhhhhhhh |
| 104880 | 180 | atggccctccctgtcaccgccctgctgcttccgctggctcttctgctccacgccgctcggcccgaa |
| CAR6- | | attgtgatgacccagtcacccgccactcttagcctttcacccggtgagcgcgcaaccctgtcttgc |
| Full-nt | | agagcctcccaagacatctcaaaataccttaattggtatcaacagaagcccggacaggctcct |
| | | cgccttctgatctaccacaccagccggctccattctggaatccctgccaggttcagcggtagcgg |
| | | atctgggaccgactacaccctcactatcagctcactgcagccagaggacttcgctgtctatttctg |
| | | tcagcaagggaacaccctgccctacacctttggacagggcaccaagctcgagattaaaggtg |
| | | gaggtggcagcggaggaggtgggtccggcggtggaggaagcggaggcggagggagcca |
| | | ggtccaactccaagaaagcggaccgggtcttgtgaagccatcagaaactctttcactgacttgt |
| | | actgtgagcggagtgtctctccccgattacggggtgtcttggatcagacagccaccggggaag |
| | | ggtctggaatggattggagtgatttggggctctgagactacttactaccaatcatccctcaagtca |
| | | cgcgtcaccatctcaaaggacaactctaagaatcaggtgtcactgaaactgtcatctgtgaccg |
| | | cagccgacaccgccgtgtactattgcgctaagcattactattatggcgggagctacgcaatgga |
| | | ttactggggacagggtactctggtcaccgtgtccagcaccactaccccagcaccgaggccacc |
| | | caccccggctcctaccatcgcctcccagcctctgtccctgcgtccggaggcatgtagacccgca |
| | | gctggtggggccgtgcatacccggggtcttgacttcgcctgcgatatctacatttgggcccctctg |
| | | gctggtacttgcggggtcctgctgctttcactcgtgatcactctttactgtaagcgcggtcggaaga |
| | | agctgctgtacatctttaagcaacccttcatgaggcctgtgcagactactcaagaggaggacgg |
| | | ctgttcatgccggttcccagaggaggaggaaggcggctgcgaactgcgcgtgaaattcagcc |
| | | gcagcgcagatgctccagcctacaagcaggggcagaaccagctctacaacgaactcaatctt |
| | | ggtcggagagaggagtacgacgtgctggacaagcggagaggacgggacccagaaatggg |
| | | cgggaagccgcgcagaaagaatccccaagagggcctgtacaacgagctccaaaaggata |
| | | agatggcagaagcctatagcgagattggtatgaaaggggaacgcagaagaggcaaaggcc |
| | | acgacggactgtaccagggactcagcaccgccaccaaggacacctatgacgctcttcacatg |
| | | caggccctgccgcctcgg |
| 104880 | 127 | MALPVTALLLPLALLLHAARPeivmtqspatlslspgeratlscrasqdiskylnwy |
| CAR6- | | qqkpgqaprlliyhtsrlhsgiparfsgsgsgtdytltisslqpedfavyfcqqgntlpytfgqgtkl |
| Full-aa | | eikggggsggggsggggsggggsqvqlqesgpglvkpsetlsltctvsgvslpdygvswirq |
| | | ppgkglewigviwgsettyyqsslksrvtiskdnsknqvslklssvtaadtavyycakhyyy |
| | | ggsyamdywgqgtlvtvsstttpaprpptpaptiasqplslrpeacrpaaggavhtrgldfacdi |
| | | yiwaplagtcgvlllslvitlyckrgrkkllyifkqpfmrpvqttqeedgcscrfpeeeeggcelrvkfs |
| | | rsadapaykqgqnqlynelnlgrreeydvldkrrgrdpemggkprrknpqeglynelqkdkm |
| | | aeayseigmkgerrrgkghdglyqglstatkdtydalhmqalppr |

CAR 7

| | | |
|---|---|---|
| CAR7 | 102 | qvqlqesgpglvkpsetlsltctvsgvslpdygvswirqppgkglewigviwgsettyyssslksr |
| scFv | | vtiskdnsknqvslklssvtaadtavyycakhyyyggsyamdywgqgtlvtvssggggsggg |
| domain | | gsggggsggggseivmtqspatlslspgeratlscrasqdiskylnwyqqkpgqaprlliyhtsrl |
| | | hsgiparfsgsgsgtdytltisslqpedfavyfcqqgntlpytfgqgtkleik |
| 100796 | 157 | atggcactgcctgtcactgccctcctgctgcctctggccctccttctgcatgccgccaggccccaa |
| CAR7- | | gtccagctgcaagagtcaggacccggactggtgaagccgtctgagactctctcactgacttgta |
| Soluble | | ccgtcagcggcgtgtccctccccgactacggagtgtcatggatccgccaacctcccgggaaag |
| scFv-nt | | ggcttgaatggattggtgtcatctggggttctgaaaccacctactactcatcttccctgaagtccag |
| | | ggtgaccatcagcaaggataattccaagaaccaggtcagccttaagctgtcatctgtgaccgct |
| | | gctgacaccgccgtgtattactgcgccaagcactactattacggaggaagctacgctatggact |
| | | attggggacagggcactctcgtgactgtgagcagcggcggtggagggtctggaggtggagga |
| | | tccggtggtggtgggtcaggcggaggagggagcgagattgtgatgactcagtcaccagccac |
| | | cctttctctttcacccggcgagagagcaaccctgagctgtagagccagccaggacatttctaagt |
| | | acctcaactggtatcagcaaaaaccggggcaggcccctcgcctcctgatctaccatacctcac |
| | | gccttcactctggtatccccgctcggtttagcggatcaggatctggtaccgactacactctgacca |
| | | tttccagcctgcagccagaagatttcgcagtgtatttctgccagcagggcaatacccttccttaca |
| | | ccttcggtcagggaaccaagctcgaaatcaagcaccatcaccatcatcaccaccat |
| 100796 | 169 | MALPVTALLLPLALLLHAARPqvqlqesgpglvkpsetlsltctvsgvslpdygvs |
| CAR7- | | wirqppgkglewigviwgsettyyssslksrvtiskdnsknqvslklssvtaadtavyycakhyy |
| Soluble | | yggsyamdywgqgtlvtvssggggsggggsggggsggggseivmtqspatlslspgeratl |
| scFv-aa | | scrasqdiskylnwyqqkpgqaprlliyhtsrlhsgiparfsgsgsgtdytltisslqpedfavyfcq |
| | | qgntlpytfgqgtkleikhhhhhhhh |
| 104881 | 181 | atggctctgcccgtgaccgcactcctcctgccactggctctgctgcttcacgccgctcgcccaca |
| CAR 7 | | agtccagcttcaagaatcagggcctggtctggtgaagccatctgagactctgtccctcacttgca |
| Full-nt | | ccgtgagcggagtgtccctcccagactacggagtgagctggattagacagcctcccggaaag |
| | | ggactggagtggatcggagtgatttggggtagcgaaaccacttactattcatcttccctgaagtc |
| | | acgggtcaccatttcaaaggataactcaaagaatcaagtgagcctcaagctctcatcagtcac |
| | | cgccgctgacaccgccgtgtattactgtgccaagcattactactatggagggtcctacgccatgg |
| | | actactggggccagggaactctggtcactgtgtcatctggtggaggaggtagcggaggaggc |
| | | gggagcggtggaggtggctccggaggtggcggaagcgaaatcgtgatgacccagagccct |
| | | gcaaccctgtccctttctcccggggaacgggctaccctttcttgtcgggcatcacaagatatctca |
| | | aaatacctcaattggtatcaacagaagccgggacaggcccctaggcttcttatctaccacacct |
| | | ctcgcctgcatagcgggattcccgcacgctttagcgggtctggaagcgggaccgactacactct |
| | | gaccatctcatctctccagcccgaggacttcgccgtctacttctgccagcagggtaacaccctgc |
| | | cgtacaccttcggccagggcaccaagcttgagatcaaaaccactactcccgctccaaggcca |
| | | cccacccctgccccgaccatcgcctctcagccgctttccctgcgtccggaggcatgtagacccg |
| | | cagctggtggggccgtgcatacccggggtcttgacttcgcctgcgatatctacatttgggcccctc |
| | | tggctggtacttgcggggtcctgctgctttcactcgtgatcactctttactgtaagcgcggtcggaa |
| | | gaagctgctgtacatctttaagcaacccttcatgaggcctgtgcagactactcaagaggaggac |
| | | ggctgttcatgccggttcccagaggaggaggaaggcggctgcgaactgcgcgtgaaattcag |
| | | ccgcagcgcagatgctccagcctacaagcaggggcagaaccagctctacaacgaactcaat |
| | | cttggtcggagagaggagtacgacgtgctggacaagcggagaggacgggacccagaaatg |
| | | ggcgggaagccgcgcagaaagaatccccaagagggcctgtacaacgagctccaaaagga |
| | | taagatggcagaagcctatagcgagattggtatgaaaggggaacgcagaagaggcaaagg |
| | | ccacgacggactgtaccagggactcagcaccgccaccaaggacacctatgacgctcttcaca |
| | | tgcaggccctgccgcctcgg |
| 104881 | 128 | MALPVTALLLPLALLLHAARPqvqlqesgpglvkpsetlsltctvsgvslpdygvswi |
| CAR 7 | | rqppgkglewigviwgsettyyssslksrvtiskdnsknqvslklssvtaadtavyycakhyy |
| Full-aa | | yggsyamdywgqgtlvtvssggggsggggsggggsggggseivmtqspatlslspgeratl |
| | | scrasqdiskylnwyqqkpgqaprlliyhtsrlhsgiparfsgsgsgtdytltisslqpedfavyf |
| | | cqqgntlpytfgqgtkleiktttpaprpptpaptiasqplslrpeacrpaaggavhtrgldfacdiyi |
| | | waplagtcgvlllslvitlyckrgrkkllyifkqpfmrpvqttqeedgcscrfpeeeeggcelrvkfsr |
| | | sadapaykqgqnqlynelnlgrreeydvldkrrgrdpemggkprrknpqeglynelqkdkma |
| | | eayseigmkgerrrgkghdglyqglstatkdtydalhmqalppr |

CAR 8

| | | |
|---|---|---|
| CAR8 | 103 | qvqlqesgpglvkpsetlsltctvsgvslpdygvswirqppgkglewigviwgsettyyqsslksr |
| scFv | | vtiskdnsknqvslklssvtaadtavyycakhyyyggsyamdywgqgtlvtvssggggsggg |
| domain | | gsggggsggggseivmtqspatlslspgeratlscrasqdiskylnwyqqkpgqaprlliyhtsrl |
| | | hsgiparfsgsgsgtdytltisslqpedfavyfcqqgntlpytfgqgtkleik |
| 100798 | 158 | atggcactgcctgtcactgccctcctgctgcctctggccctccttctgcatgccgccaggccccaa |
| CAR8- | | gtccagctgcaagagtcaggacccggactggtgaagccgtctgagactctctcactgacttgta |
| Soluble | | ccgtcagcggcgtgtccctccccgactacggagtgtcatggatccgccaacctcccgggaaag |
| scFv-nt | | ggcttgaatggattggtgtcatctggggttctgaaaccacctactaccagtcttccctgaagtcca |
| | | gggtgaccatcagcaaggataattccaagaaccaggtcagccttaagctgtcatctgtgaccg |
| | | ctgctgacaccgccgtgtattactgcgccaagcactactattacggaggaagctacgctatgga |
| | | ctattggggacagggcactctcgtgactgtgagcagcggcggtggagggtctggaggtggag |
| | | gatccggtggtggtgggtcaggcggaggagggagcgagattgtgatgactcagtcaccagcc |
| | | accctttctctttcacccggcgagagagcaaccctgagctgtagagccagccaggacatttcta |
| | | agtacctcaactggtatcagcaaaaaccggggcaggcccctcgcctcctgatctaccatacctc |
| | | acgccttcactctggtatccccgctcggtttagcggatcaggatctggtaccgactacactctgac |
| | | catttccagcctgcagccagaagatttcgcagtgtatttctgccagcagggcaatacccttcctta |
| | | caccttcggtcagggaaccaagctcgaaatcaagcaccatcaccatcatcatcaccac |
| 100798 | 170 | MALPVTALLLPLALLLHAARPqvqlqesgpglvkpsetlsltctvsgvslpdygvs |
| CAR8- | | wirqppgkglewigviwgsettyyqsslksrvtiskdnsknqvslklssvtaadtavyycakhyy |
| Soluble | | yggsyamdywgqgtlvtvssggggsggggsggggsggggseivmtqspatlslspgeratl |
| scFv-aa | | scrasqdiskylnwyqqkpgqaprlliyhtsrlhsgiparfsgsgsgtdytltisslqpedfavyfcq |
| | | qgntlpytfgqgtkleikhhhhhhhh |
| 104882 | 182 | atggctctgcccgtgaccgcactcctcctgccactggctctgctgcttcacgccgctcgcccaca |
| CAR 8- | | agtccagcttcaagaatcagggcctggtctggtgaagccatctgagactctgtccctcacttgca |
| Full-nt | | ccgtgagcggagtgtccctcccagactacggagtgagctggattagacagcctcccggaaag |
| | | ggactggagtggatcggagtgatttggggtagcgaaaccacttactatcaatcttccctgaagtc |
| | | acgggtcaccatttcaaaggataactcaaagaatcaagtgagcctcaagctctcatcagtcac |
| | | cgccgctgacaccgccgtgtattactgtgccaagcattactactatggagggtcctacgccatgg |
| | | actactggggccagggaactctggtcactgtgtcatctggtggaggaggtagcggaggaggc |
| | | gggagcggtggaggtggctccggaggcggtgggtcagaaatcgtgatgacccagagccctg |
| | | caaccctgtccctttctcccggggaacgggctaccctttcttgtcgggcatcacaagatatctcaa |
| | | aatacctcaattggtatcaacagaagccgggacaggcccctaggcttcttatctaccacacctct |
| | | cgcctgcatagcgggattcccgcacgctttagcgggtctggaagcgggaccgactacactctg |
| | | accatctcatctctccagcccgaggacttcgccgtctacttctgccagcagggtaacaccctgcc |
| | | gtacaccttcggccagggcaccaagcttgagatcaaaaccactactcccgctccaaggccac |
| | | ccacccctgccccgaccatcgcctctcagccgctttccctgcgtccggaggcatgtagacccgc |
| | | agctggtggggccgtgcatacccggggtcttgacttcgcctgcgatatctacatttgggcccctct |
| | | ggctggtacttgcggggtcctgctgctttcactcgtgatcactctttactgtaagcgcggtcggaag |
| | | aagctgctgtacatctttaagcaacccttcatgaggcctgtgcagactactcaagaggaggacg |
| | | gctgttcatgccggttcccagaggaggaggaaggcggctgcgaactgcgcgtgaaattcagc |
| | | cgcagcgcagatgctccagcctacaagcaggggcagaaccagctctacaacgaactcaatc |
| | | ttggtcggagagaggagtacgacgtgctggacaagcggagaggacgggacccagaaatgg |
| | | gcgggaagccgcgcagaaagaatccccaagagggcctgtacaacgagctccaaaaggat |
| | | aagatggcagaagcctatagcgagattggtatgaaaggggaacgcagaagaggcaaagg |
| | | ccacgacggactgtaccagggactcagcaccgccaccaaggacacctatgacgctcttcaca |
| | | tgcaggccctgccgcctcgg |
| 104882 | 129 | MALPVTALLLPLALLLHAARPqvqlqesgpglvkpsetlsltctvsgvslpdygvswi |
| CAR 8- | | rqppgkglewigviwgsettyyqsslksrvtiskdnsknqvslklssvtaadtavyycakhyy |
| Full-aa | | yggsyamdywgqgtlvtvssggggsggggsggggsggggseivmtqspatlslspgeratl |
| | | scrasqdiskylnwyqqkpgqaprlliyhtsrlhsgiparfsgsgsgtdytltisslqpedfavyf |
| | | cqqgntlpytfgqgtkleiktttpaprpptpaptiasqplslrpeacrpaaggavhtrgldfacdiyi |
| | | waplagtcgvlllslvitlyckrgrkkllyifkqpfmrpvqttqeedgcscrfpeeeeggcelrvkfsr |
| | | sadapaykqgqnqlynelnlgrreeydvldkrrgrdpemggkprrknpqeglynelqkdkma |
| | | eayseigmkgerrrgkghdglyqglstatkdtydalhmqalppr |

CAR 9

| | | |
|---|---|---|
| CAR9 | 104 | eivmtqspatlslspgeratlscrasqdiskylnwyqqkpgqaprlliyhtsrlhsgiparfsgsgs |
| scFv | | gtdytltisslqpedfavyfcqqgntlpytfgqgtkleikggggggggsggggsggggsqvqlq |
| domain | | esgpglvkpsetlsltctvsgvslpdygvswirqppgkglewigviwgsettyynsslksrvtiskd |
| | | nsknqvslklssvtaadtavyycakhyyyggsyamdywgqgtlvtvss |
| 99789 | 159 | atggccctcccagtgaccgctctgctgctgcctctcgcacttcttctccatgccgctcggcctgag |
| CAR9- | | atcgtcatgacccaaagccccgctaccctgtccctgtcacccggcgagagggcaaccctttcat |
| Soluble | | gcagggccagccaggacatttctaagtacctcaactggtatcagcagaagccagggcaggct |
| scFv-nt | | cctcgcctgctgatctaccacaccagccgcctccacagcggtatccccgccagattttccggga |
| | | gcgggtctggaaccgactacaccctcaccatctcttctctgcagcccgaggatttcgccgtctattt |
| | | ctgccagcaggggaatactctgccgtacaccttcggtcaaggtaccaagctggaaatcaagg |
| | | gaggcggaggatcaggcggtggcggaagcggaggaggtggctccggaggaggaggttcc |
| | | caagtgcagcttcaagaatcaggacccggacttgtgaagccatcagaaaccctctccctgactt |
| | | gtaccgtgtccggtgtgagcctccccgactacggagtctcttggattcgccagcctccggggaa |
| | | gggtcttgaatggattggggtgatttggggatcagagactacttactacaattcatcacttaagtca |
| | | cgggtcaccatcagcaaagataatagcaagaaccaagtgtcacttaagctgtcatctgtgacc |
| | | gccgctgacaccgccgtgtactattgtgccaaacattactattacggagggtcttatgctatggac |
| | | tactggggacaggggaccctggtgactgtctctagccatcaccatcaccaccatcatcac |
| 99789 | 171 | MALPVTALLLPLALLLHAARPeivmtqspatlslspgeratlscrasqdiskylnwy |
| CAR9- | | qqkpgqaprlliyhtsrlhsgiparfsgsgsgtdytltisslqpedfavyfcqqgntlpytfgqgtklei |
| Soluble | | kggggggggsggggsggggsqvqlqesgpglvkpsetlsltctvsgvslpdygvswirqpp |
| scFv-aa | | gkglewigviwgsettyynsslksrvtiskdnsknqvslklssvtaadtavyycakhyyyggsya |
| | | mdywgqgtlvtvsshhhhhhhh |
| 105974 | 183 | atggccctccctgtcaccgccctgctgcttccgctggctcttctgctccacgccgctcggcccgaa |
| CAR 9- | | attgtgatgacccagtcacccgccactcttagcctttcacccggtgagcgcgcaaccctgtcttgc |
| Full-nt | | agagcctcccaagacatctcaaaataccttaattggtatcaacagaagcccggacaggctcct |
| | | cgccttctgatctaccacaccagccggctccattctggaatccctgccaggttcagcggtagcgg |
| | | atctgggaccgactacaccctcactatcagctcactgcagccagaggacttcgctgtctatttctg |
| | | tcagcaagggaacaccctgccctacacctttggacagggcaccaagctcgagattaaaggtg |
| | | gaggtggcagcggaggaggtgggtccggcggtggaggaagcggaggcggtgggagccag |
| | | gtccaactccaagaaagcggaccgggtcttgtgaagccatcagaaactctttcactgacttgta |
| | | ctgtgagcggagtgtctctccccgattacggggtgtcttggatcagacagccaccggggaagg |
| | | gtctggaatggattggagtgatttggggctctgagactacttactacaactcatccctcaagtcac |
| | | gcgtcaccatctcaaaggacaactctaagaatcaggtgtcactgaaactgtcatctgtgaccgc |
| | | agccgacaccgccgtgtactattgcgctaagcattactattatggcgggagctacgcaatggatt |
| | | actggggacagggtactctggtcaccgtgtccagcaccactaccccagcaccgaggccaccc |
| | | accccggctcctaccatcgcctcccagcctctgtccctgcgtccggaggcatgtagacccgcag |
| | | ctggtggggccgtgcatacccggggtcttgacttcgcctgcgatatctacatttgggcccctctgg |
| | | ctggtacttgcggggtcctgctgctttcactcgtgatcactctttactgtaagcgcggtcggaagaa |
| | | gctgctgtacatctttaagcaacccttcatgaggcctgtgcagactactcaagaggaggacggc |
| | | tgttcatgccggttcccagaggaggaggaaggcggctgcgaactgcgcgtgaaattcagccg |
| | | cagcgcagatgctccagcctacaagcaggggcagaaccagctctacaacgaactcaatcttg |
| | | gtcggagagaggagtacgacgtgctggacaagcggagaggacgggacccagaaatgggc |
| | | gggaagccgcgcagaaagaatccccaagagggcctgtacaacgagctccaaaaggataa |
| | | gatggcagaagcctatagcgagattggtatgaaaggggaacgcagaagaggcaaaggcca |
| | | cgacggactgtaccagggactcagcaccgccaccaaggacacctatgacgctcttcacatgc |
| | | aggccctgccgcctcgg |
| 105974 | 130 | MALPVTALLLPLALLLHAARPeivmtqspatlslspgeratlscrasqdiskylnwy |
| CAR 9- | | qqkpgqaprlliyhtsrlhsgiparfsgsgsgtdytltisslqpedfavyfcqqgntlpytfgqgtkl |
| Full-aa | | eikggggggggsggggsggggsqvqlqesgpglvkpsetlsltctvsgvslpdygvswirq |
| | | ppgkglewigviwgsettyynsslksrvtiskdnsknqvslklssvtaadtavyycakhyyy |
| | | ggsyamdywgqgtlvtvsstttpaprpptpaptiasqplslrpeacrpaaggavhtrgldfacdi |
| | | yiwaplagtcgvlllslvitlyckrgrkkllyifkqpfmrpvqttqeedgcscrfpeeeeggcelrvkfs |
| | | rsadapaykqgqnqlynelnlgrreeydvldkrrgrdpemggkprrknpqeglynelqkdkm |
| | | aeayseigmkgerrrgkghdglyqglstatkdtydalhmqalppr |

CAR10

| | | |
|---|---|---|
| CAR10 | 105 | qvqlqesgpglvkpsetlsltctvsgvslpdygvswirqppgkglewigviwgsettyynsslksr |
| scFv | | vtiskdnsknqvslklssvtaadtavyycakhyyyggsyamdywgqgtlvtvssggggsggg |
| domain | | gsggggsggggseivmtqspatlslspgeratlscrasqdiskylnwyqqkpgqaprlliyhtsrl |
| | | hsgiparfsgsgsgtdytltisslqpedfavyfcqqgntlpytfgqgtkleik |
| 100796 | 160 | atggcactgcctgtcactgccctcctgctgcctctggccctccttctgcatgccgccaggccccaa |
| CAR10- | | gtccagctgcaagagtcaggacccggactggtgaagccgtctgagactctctcactgacttgta |
| Soluble | | ccgtcagcggcgtgtccctccccgactacggagtgtcatggatccgccaacctcccgggaaag |
| scFv-nt | | ggcttgaatggattggtgtcatctggggttctgaaaccacctactacaactcttccctgaagtcca |
| | | gggtgaccatcagcaaggataattccaagaaccaggtcagccttaagctgtcatctgtgaccg |
| | | ctgctgacaccgccgtgtattactgcgccaagcactactattacggaggaagctacgctatgga |
| | | ctattggggacagggcactctcgtgactgtgagcagcggcggtggagggtctggaggtggag |
| | | gatccggtggtggtgggtcaggcggaggagggagcgagattgtgatgactcagtcaccagcc |
| | | accctttctctttcacccggcgagagagcaaccctgagctgtagagccagccaggacatttcta |
| | | agtacctcaactggtatcagcaaaaaccggggcaggcccctcgcctcctgatctaccatacctc |
| | | acgccttcactctggtatccccgctcggtttagcggatcaggatctggtaccgactacactctgac |
| | | catttccagcctgcagccagaagatttcgcagtgtatttctgccagcagggcaatacccttcctta |
| | | caccttcggtcagggaaccaagctcgaaatcaagcaccatcaccatcatcaccaccat |
| 100796 | 172 | MALPVTALLLPLALLLHAARPqvqlqesgpglvkpsetlsltctvsgvslpdygvs |
| CAR10- | | wirqppgkglewigviwgsettyynsslksrvtiskdnsknqvslklssvtaadtavyycakhyy |
| Soluble | | yggsyamdywgqgtlvtvssggggsggggsggggsggggseivmtqspatlslspgeratl |
| scFv-aa | | scrasqdiskylnwyqqkpgqaprlliyhtsrlhsgiparfsgsgsgtdytltisslqpedfavyfcq |
| | | qgntlpytfgqgtkleikhhhhhhhh |
| 105975 | 184 | atggccctccctgtcaccgccctgctgcttccgctggctcttctgctccacgccgctcggcccgaa |
| CAR 10 | | attgtgatgacccagtcacccgccactcttagcctttcacccggtgagcgcgcaaccctgtcttgc |
| Full-nt | | agagcctcccaagacatctcaaaataccttaattggtatcaacagaagcccggacaggctcct |
| | | cgccttctgatctaccacaccagccggctccattctggaatccctgccaggttcagcggtagcgg |
| | | atctgggaccgactacaccctcactatcagctcactgcagccagaggacttcgctgtctatttctg |
| | | tcagcaagggaacaccctgccctacacctttggacagggcaccaagctcgagattaaaggtg |
| | | gaggtggcagcggaggaggtgggtccggcggtggaggaagcggaggcggtgggagccag |
| | | gtccaactccaagaaagcggaccgggtcttgtgaagccatcagaaactctttcactgacttgta |
| | | ctgtgagcggagtgtctctccccgattacggggtgtcttggatcagacagccaccggggaagg |
| | | gtctggaatggattggagtgatttggggctctgagactacttactacaactcatccctcaagtcac |
| | | gcgtcaccatctcaaaggacaactctaagaatcaggtgtcactgaaactgtcatctgtgaccgc |
| | | agccgacaccgccgtgtactattgcgctaagcattactattatggcgggagctacgcaatggatt |
| | | actggggacagggtactctggtcaccgtgtccagcaccactaccccagcaccgaggccaccc |
| | | accccggctcctaccatcgcctcccagcctctgtccctgcgtccggaggcatgtagacccgcag |
| | | ctggtggggccgtgcatacccggggtcttgacttcgcctgcgatatctacatttgggcccctctgg |
| | | ctggtacttgcggggtcctgctgctttcactcgtgatcactctttactgtaagcgcggtcggaagaa |
| | | gctgctgtacatctttaagcaacccttcatgaggcctgtgcagactactcaagaggaggacggc |
| | | tgttcatgccggttcccagaggaggaggaaggcggctgcgaactgcgcgtgaaattcagccg |
| | | cagcgcagatgctccagcctacaagcaggggcagaaccagctctacaacgaactcaatcttg |
| | | gtcggagagaggagtacgacgtgctggacaagcggagaggacgggacccagaaatgggc |
| | | gggaagccgcgcagaaagaatccccaagagggcctgtacaacgagctccaaaaggataa |
| | | gatggcagaagcctatagcgagattggtatgaaaggggaacgcagaagaggcaaaggcca |
| | | cgacggactgtaccagggactcagcaccgccaccaaggacacctatgacgctcttcacatgc |
| | | aggccctgccgcctcgg |
| 105975 | 131 | MALPVTALLLPLALLLHAARPEIVMTQSPATLSLSPGERATLSCRAS |
| CAR 10 | | QDISKYLNWYQQKPGQAPRLLIYHTSRLHSGIPARFSGSGSGTDYT |
| Full-aa | | LTISSLQPEDFAVYFCQQGNTLPYTFGQGTKLEIKGGGGSGGGGS |
| | | GGGGSGGGGSQVQLQESGPGLVKPSETLSLTCTVSGVSLPDYGV |
| | | SWIRQPPGKGLEWIGVIWGSETTYYNSSLKSRVTISKDNSKNQVSL |
| | | KLSSVTAADTAVYYCAKHYYYGGSYAMDYWGQGTLVTVSSTTTPA |
| | | PRPPTPAPTIASQPLSLRPEACRPAAGGAVHTRGLDFACDIYIWAPL |
| | | AGTCGVLLLSLVITLYCKRGRKKLLYIFKQPFMRPVQTTQEEDGCSC |
| | | RFPEEEEGGCELRVKFSRSADAPAYKQGQNQLYNELNLGRREEYD |
| | | VLDKRRGRDPEMGGKPRRKNPQEGLYNELQKDKMAEAYSEIGMK |
| | | GERRRGKGHDGLYQGLSTATKDTYDALHMQALPPR |

CAR11

| | | |
|---|---|---|
| CAR11 | 106 | eivmtqspatlslspgeratlscrasqdiskylnwyqqkpgqaprlliyhtsrlhsgiparfsgsgs |
| scFv | | gtdytltisslqpedfavyfcqqgntlpytfgqgtkleikggggsggggsggggsqvqlqesgpgl |
| domain | | vkpsetlsltctvsgvslpdygvswirqppgkglewigviwgsettyynsslksrvtiskdnsknq |
| | | vslklssvtaadtavyycakhyyyggsyamdywgqgtlvtvss |
| 103101 | 161 | Atggccctccctgtcaccgccctgctgcttccgctggctcttctgctccacgccgctcggcccgaa |
| CAR11- | | attgtgatgacccagtcacccgccactcttagcctttcacccggtgagcgcgcaaccctgtcttgc |
| Soluble | | agagcctcccaagacatctcaaaataccttaattggtatcaacagaagcccggacaggctcct |
| scFv-nt | | cgccttctgatctaccacaccagccggctccattctggaatccctgccaggttcagcggtagcgg |
| | | atctgggaccgactacaccctcactatcagctcactgcagccagaggacttcgctgtctatttctg |
| | | tcagcaagggaacaccctgccctacacctttggacagggcaccaagctcgagattaaaggtg |
| | | gaggtggcagcggaggaggtgggtccggcggtggaggaagccaggtccaactccaagaa |
| | | agcggaccgggtcttgtgaagccatcagaaactctttcactgacttgtactgtgagcggagtgtct |
| | | ctccccgattacggggtgtcttggatcagacagccaccggggaagggtctggaatggattgga |
| | | gtgatttggggctctgagactacttactacaattcatccctcaagtcacgcgtcaccatctcaaag |
| | | gacaactctaagaatcaggtgtcactgaaactgtcatctgtgaccgcagccgacaccgccgtgt |
| | | actattgcgctaagcattactattatgggggagctacgcaatggattactggggacagggtact |
| | | ctggtcaccgtgtccagccaccaccatcatcaccatcaccat |
| 103101 | 173 | MALPVTALLLPLALLLHAARPeivmtqspatlslspgeratlscrasqdiskylnwy |
| CAR11- | | qqkpgqaprlliyhtsrlhsgiparfsgsgsgtdytltisslqpedfavyfcqqgntlpytfgqgtklei |
| Soluble | | kggggsggggsggggsqvqlqesgpglvkpsetlsltctvsgvslpdygvswirqppgkglew |
| scFv-aa | | igviwgsettyynsslksrvtiskdnsknqvslklssvtaadtavyycakhyyyggsyamdywg |
| | | qgtlvtvsshhhhhhhh |
| 105976 | 185 | atggctctgcccgtgaccgcactcctcctgccactggctctgctgcttcacgccgctcgcccaca |
| CAR 11 | | agtccagcttcaagaatcagggcctggtctggtgaagccatctgagactctgtccctcacttgca |
| Full-nt | | ccgtgagcggagtgtccctcccagactacggagtgagctggattagacagcctcccggaaag |
| | | ggactggagtggatcggagtgatttggggtagcgaaaccacttactataactcttccctgaagtc |
| | | acgggtcaccatttcaaaggataactcaaagaatcaagtgagcctcaagctctcatcagtcac |
| | | cgccgctgacaccgccgtgtattactgtgccaagcattactactatggagggtcctacgccatgg |
| | | actactggggccagggaactctggtcactgtgtcatctggtggaggaggtagcggaggaggc |
| | | gggagcggtggaggtggctccggaggtggcggaagcgaaatcgtgatgacccagagccct |
| | | gcaaccctgtccctttctcccggggaacgggctaccctttcttgtcgggcatcacaagatatctca |
| | | aaatacctcaattggtatcaacagaagccgggacaggcccctaggcttcttatctaccacacct |
| | | ctcgcctgcatagcgggattcccgcacgctttagcgggtctggaagcgggaccgactacactct |
| | | gaccatctcatctctccagcccgaggacttcgccgtctacttctgccagcagggtaacaccctgc |
| | | cgtacaccttcggccagggcaccaagcttgagatcaaaaccactactcccgctccaaggcca |
| | | cccacccctgccccgaccatcgcctctcagccgctttccctgcgtccggaggcatgtagacccg |
| | | cagctggtggggccgtgcatacccggggtcttgacttcgcctgcgatatctacatttgggcccctc |
| | | tggctggtacttgcggggtcctgctgctttcactcgtgatcactctttactgtaagcgcggtcggaa |
| | | gaagctgctgtacatctttaagcaacccttcatgaggcctgtgcagactactcaagaggaggac |
| | | ggctgttcatgccggttcccagaggaggaggaaggcggctgcgaactgcgcgtgaaattcag |
| | | ccgcagcgcagatgctccagcctacaagcaggggcagaaccagctctacaacgaactcaat |
| | | cttggtcggagagaggagtacgacgtgctggacaagcggagaggacgggacccagaaatg |
| | | ggcgggaagccgcgcagaaagaatccccaagagggcctgtacaacgagctccaaaagga |
| | | taagatggcagaagcctatagcgagattggtatgaaaggggaacgcagaagaggcaaagg |
| | | ccacgacggactgtaccagggactcagcaccgccaccaaggacacctatgacgctcttcaca |
| | | tgcaggccctgccgcctcgg |
| 105976 | 132 | MALPVTALLLPLALLLHAARPQVQLQESGPGLVKPSETLSLTCTVSG |
| CAR 11 | | VSLPDYGVSWIRQPPGKGLEWIGVIWGSETTYYNSSLKSRVTISKD |
| Full-aa | | NSKNQVSLKLSSVTAADTAVYYCAKHYYYGGSYAMDYWGQGTLV |
| | | TVSSGGGGSGGGGSGGGGSGGGGSEIVMTQSPATLSLSPGERAT |
| | | LSCRASQDISKYLNWYQQKPGQAPRLLIYHTSRLHSGIPARFSGSG |
| | | SGTDYTLTISSLQPEDFAVYFCQQGNTLPYTFGQGTKLEIKTTTPAP |
| | | RPPTPAPTIASQPLSLRPEACRPAAGGAVHTRGLDFACDIYIWAPLA |
| | | GTCGVLLLSLVITLYCKRGRKKLLYIFKQPFMRPVQTTQEEDGCSCR |
| | | FPEEEEGGCELRVKFSRSADAPAYKQGQNQLYNELNLGRREEYDV |
| | | LDKRRGRDPEMGGKPRRKNPQEGLYNELQKDKMAEAYSEIGMKG |
| | | ERRRGKGHDGLYQGLSTATKDTYDALHMQALPPR |

CAR12

| | | |
|---|---|---|
| CAR12 | 107 | qvqlqesgpglvkpsetlsltctvsgvslpdygvswirqppgkglewigviwgsettyynsslksr |
| scFv | | vtiskdnsknqvslklssvtaadtavyycakhyyyggsyamdywgqgtlvtvssggggsggg |
| domain | | gsggggseivmtqspatlslspgeratlscrasqdiskylnwyqqkpgqaprlliyhtsrlhsgip |
| | | arfsgsgsgtdytltisslqpedfavyfcqqgntlpytfgqgtkleik |
| 103104 | 162 | atggctctgcccgtgaccgcactcctcctgccactggctctgctgcttcacgccgctcgcccaca |
| CAR12- | | agtccagcttcaagaatcagggcctggtctggtgaagccatctgagactctgtccctcacttgca |
| Soluble | | ccgtgagcggagtgtccctcccagactacggagtgagctggattagacagcctcccggaaag |
| scFv-nt | | ggactggagtggatcggagtgatttggggtagcgaaaccacttactataactcttccctgaagtc |
| | | acgggtcaccatttcaaaggataactcaaagaatcaagtgagcctcaagctctcatcagtcac |
| | | cgccgctgacaccgccgtgtattactgtgccaagcattactactatggagggtcctacgccatgg |
| | | actactggggccagggaactctggtcactgtgtcatctggtggaggaggtagcggaggaggc |
| | | gggagcggtggaggtggctccgaaatcgtgatgacccagagccctgcaaccctgtccctttctc |
| | | ccggggaacgggctaccctttcttgtcgggcatcacaagatatctcaaaatacctcaattggtat |
| | | caacagaagccgggacaggcccctaggcttcttatctaccacacctctcgcctgcatagcggg |
| | | attcccgcacgctttagcgggtctggaaggggaccgactacactctgaccatctcatctctcca |
| | | gcccgaggacttcgccgtctacttctgccagcagggtaacaccctgccgtacaccttcggccag |
| | | ggcaccaagcttgagatcaaacatcaccaccatcatcaccatcac |
| 103104 | 174 | MALPVTALLLPLALLLHAARPqvqlqesgpglvkpsetlsltctvsgvslpdygvs |
| CAR12- | | wirqppgkglewigviwgsettyynsslksrvtiskdnsknqvslklssvtaadtavyycakhyy |
| Soluble | | yggsyamdywgqgtlvtvssggggsggggsggggseivmtqspatlslspgeratlscrasq |
| scFv-aa | | diskylnwyqqkpgqaprlliyhtsrlhsgiparfsgsgsgtdytltisslqpedfavyfcqqgntlp |
| | | ytfgqgtkleikhhhhhhhh |
| 105977 | 186 | atggccctccctgtcaccgccctgctgcttccgctggctcttctgctccacgccgctcggcccgaa |
| CAR 12- | | attgtgatgacccagtcacccgccactcttagcctttcacccggtgagcgcgcaaccctgtcttgc |
| Full-nt | | agagcctcccaagacatctcaaaataccttaattggtatcaacagaagcccggacaggctcct |
| | | cgccttctgatctaccacaccagccggctccattctggaatccctgccaggttcagcggtagcgg |
| | | atctgggaccgactacaccctcactatcagctcactgcagccagaggacttcgctgtctatttctg |
| | | tcagcaagggaacaccctgccctacacctttggacagggcaccaagctcgagattaaaggtg |
| | | gaggtggcagcggaggaggtgggtccggcggtggaggaagccaggtccaactccaagaa |
| | | agcggaccgggtcttgtgaagccatcagaaactctttcactgacttgtactgtgagcggagtgtct |
| | | ctccccgattacggggtgtcttggatcagacagccaccggggaagggtctggaatggattgga |
| | | gtgatttggggctctgagactacttactacaactcatccctcaagtcacgcgtcaccatctcaaag |
| | | gacaactctaagaatcaggtgtcactgaaactgtcatctgtgaccgcagccgacaccgccgtgt |
| | | actattgcgctaagcattactattatggcgggagctacgcaatggattactggggacagggtact |
| | | ctggtcaccgtgtccagcaccactaccccagcaccgaggccacccaccccggctcctaccat |
| | | cgcctcccagcctctgtccctgcgtccggaggcatgtagacccgcagctggtggggccgtgcat |
| | | acccggggtcttgacttcgcctgcgatatctacatttgggcccctctggctggtacttgcggggtcc |
| | | tgctgctttcactcgtgatcactctttactgtaagcgcggtcggaagaagctgctgtacatctttaag |
| | | caacccttcatgaggcctgtgcagactactcaagaggaggacggctgttcatgccggttcccag |
| | | aggaggaggaaggcggctgcgaactgcgcgtgaaattcagccgcagcgcagatgctccag |
| | | cctacaagcaggggcagaaccagctctacaacgaactcaatcttggtcggagagaggagta |
| | | cgacgtgctggacaagcggagaggacgggacccagaaatgggcgggaagccgcgcaga |
| | | aagaatccccaagagggcctgtacaacgagctccaaaaggataagatggcagaagcctata |
| | | gcgagattggtatgaaaggggaacgcagaagaggcaaaggccacgacggactgtaccag |
| | | ggactcagcaccgccaccaaggacacctatgacgctcttcacatgcaggccctgccgcctcg |
| | | g |
| 105977 | 133 | MALPVTALLLPLALLLHAARPEIVMTQSPATLSLSPGERATLSCRAS |
| CAR 12- | | QDISKYLNWYQQKPGQAPRLLIYHTSRLHSGIPARFSGSGSGTDYT |
| Full-aa | | LTISSLQPEDFAVYFCQQGNTLPYTFGQGTKLEIKGGGGSGGGGS |
| | | GGGGSQVQLQESGPGLVKPSETLSLTCTVSGVSLPDYGVSWIRQP |
| | | PGKGLEWIGVIWGSETTYYNSSLKSRVTISKDNSKNQVSLKLSSVT |
| | | AADTAVYYCAKHYYYGGSYAMDYWGQGTLVTVSSTTTPAPRPPTP |
| | | APTIASQPLSLRPEACRPAAGGAVHTRGLDFACDIYIWAPLAGTCG |
| | | VLLLSLVITLYCKRGRKKLLYIFKQPFMRPVQTTQEEDGCSCRFPEE |
| | | EEGGCELRVKFSRSADAPAYKQGQNQLYNELNLGRREEYDVLDKR |
| | | RGRDPEMGGKPRRKNPQEGLYNELQKDKMAEAYSEIGMKGERRR |
| | | GKGHDGLYQGLSTATKDTYDALHMQALPPR |

[0652] Exemplary ful CAR constructs having scFv domains SEQ ID NOs: 96-107 are shown in SEQ ID NOs: 122-133.

[0653] The sequences of the murine scFv fragments (SEQ ID NOS: 188, 194, 196 and 199) are provided below in Table 17.

TABLE 17
Murine CD19 CAR Constructs

| Name | | |
|---|---|---|
| CTL019 | SEQ ID | Sequence |
| CTL019- | 187 | Atggccctgcccgtcaccgctctgctgctgccccttgctctgcttcttcatgcagcaaggccggac |
| Soluble | | atccagatgacccaaaccacctcatccctctctgcctctcttggagacagggtgaccatttcttgtc |
| scFv- | | gcgccagccaggacatcagcaagtatctgaactggtatcagcagaagccggacggaaccgt |
| Histag-nt | | gaagctcctgatctaccatacctctcgcctgcatagcggcgtgccctcacgcttctctggaagcg |
| | | gatcaggaaccgattattctctcactatttcaaatcttgagcaggaagatattgccacctatttctgc |
| | | cagcagggtaataccctgccctacaccttcggaggagggaccaagctcgaaatcaccggtgg |
| | | aggaggcagcggcggtggagggtctggtggaggtggttctgaggtgaagctgcaagaatca |
| | | ggccctggacttgtggccccttcacagtccctgagcgtgacttgcaccgtgtccggagtctccctg |
| | | cccgactacggagtgtcatggatcagacaacctccacggaaaggactggaatggctcggtgt |
| | | catctggggtagcgaaactacttactacaattcagccctcaaaagcaggctgactattatcaag |
| | | gacaacagcaagtcccaagtctttcttaagatgaactcactccagactgacgacaccgcaatct |
| | | actattgtgctaagcactactactacggaggatcctacgctatggattactggggacaaggtactt |
| | | ccgtcactgtctcttcacaccatcatcaccatcaccatcac |
| CTL019- | 188 | MALPVTALLLPLALLLHAARPdiqmtqttsslsaslgdrvtiscrasqdiskylnwyq |
| Soluble | | qkpdgtvklliyhtsrlhsgvpsrfsgsgsgtdysltisnleqediatyfcqqgntlpytfgggtkleit |
| scFv- | | ggggsggggsggggsevklqesgpglvapsqslsvtctvsgvslpdygvswirqpprkglewl |
| Histag-aa | | gviwgsettyynsalksrltiikdnsksqvflkmnslqtddtaiyycakhyyyggsyamdywgq |
| | | gtsvtvsshhhhhhhh |
| CTL019 | 189 | atggccttaccagtgaccgccttgctcctgccgctggccttgctgctccacgccgccaggccgg |
| Full-nt | | acatccagatgacacagactacatcctccctgtctgcctctctgggagacagagtcaccatcag |
| | | ttgcagggcaagtcaggacattagtaaatatttaaattggtatcagcagaaaccagatggaact |
| | | gttaaactcctgatctaccatacatcaagattacactcaggagtcccatcaaggttcagtggcag |
| | | tgggtctggaacagattattctctcaccattagcaacctggagcaagaagatattgccacttacttt |
| | | tgccaacagggtaatacgcttccgtacacgttcggaggggggaccaagctggagatcacagg |
| | | tggcggtggctcgggcggtggtgggtcgggtggcggcggatctgaggtgaaactgcaggagt |
| | | caggacctggcctggtggcgccctcacagagcctgtccgtcacatgcactgtctcaggggtctc |
| | | attacccgactatggtgtaagctggattcgccagcctccacgaaagggtctggagtggctggga |
| | | gtaatatggggtagtgaaaccacatactataattcagctctcaaatccagactgaccatcatcaa |
| | | ggacaactccaagagccaagttttcttaaaaatgaacagtctgcaaactgatgacacagccatt |
| | | tactactgtgccaaacattattactacggtggtagctatgctatggactactggggccaaggaac |
| | | ctcagtcaccgtctcctcaaccacgacgccagcgccgcgaccaccaacaccggcgcccacc |
| | | atcgcgtcgcagcccctgtccctgcgcccagaggcgtgccggccagcggcggggggcgcag |
| | | tgcacacgagggggctggacttcgcctgtgatatctacatctgggcgcccttggccgggacttgt |
| | | ggggtccttctcctgtcactggttatcaccctttactgcaaacggggcagaaagaaactcctgtat |
| | | atattcaaacaaccatttatgagaccagtacaaactactcaagaggaagatggctgtagctgcc |
| | | gatttccagaagaagaagaaggaggatgtgaactgagagtgaagttcagcaggagcgcag |
| | | acgcccccgcgtacaagcagggccagaaccagctctataacgagctcaatctaggacgaag |
| | | agaggagtacgatgttttggacaagagacgtggccgggaccctgagatggggggaaagccg |
| | | agaaggaagaaccctcaggaaggcctgtacaatgaactgcagaaagataagatggcggag |
| | | gcctacagtgagattgggatgaaaggcgagcgccggaggggcaaggggcacgatggccttt |
| | | accagggtctcagtacagccaccaaggacacctacgacgcccttcacatgcaggccctgccc |
| | | cctcgc |
| CTL019 | 148 | MALPVTALLLPLALLLHAARPdiqmtqttsslsaslgdrvtiscrasqdiskylnwyqq |
| Full-aa | | kpdgtvklliyhtsrlhsgvpsrfsgsgsgtdysltisnleqediatyfcqqgntlpytfgggtkleitg |
| | | gggsggggsggggsevklqesgpglvapsqslsvtctvsgvslpdygvswirqpprkglewlg |
| | | viwgsettyynsalksrltiikdnsksqvflkmnslqtddtaiyycakhyyyggsyamdywgqgt |
| | | svtvsstttpaprpptpaptiasqplslrpeacrpaaggavhtrgldfacdiyiwaplagtcgvlllsl |
| | | vitlyckrgrkkllyifkqpfmrpvqttqeedgcscrfpeeeeggcelrvkfsrsadapaykqgqn |
| | | qlynelnlgrreeydvldkrrgrdpemggkprrknpqeglynelqkdkmaeayseigmkgerr |
| | | rgkghdglyqglstatkdtydalhmqalppr |
| CTL019 | 149 | Diqmtqttsslsaslgdrvtiscrasqdiskylnwyqqkpdgtvklliyhtsrlhsgvpsrfsgsgs |
| scFv | | gtdysltisnleqediatyfcqqgntlpytfgggtkleitggggsggggsggggsevklqesgpgl |
| domain | | vapsqslsvtctvsgvslpdygvswirqpprkglewlgviwgsettyynsalksrltiikdnsksqv |
| | | flkmnslqtddtaiyycakhyyyggsyamdywgqgtsvtvss |
| mCAR1 | 194 | QVQLLESGAELVRPGSSVKISCKASGYAFSSYWMNWVKQRPGQG |
| scFv | | LEWIGQIYPGDGDTNYNGKFKGQATLTADKSSSTAYMQLSGLTSED |
| | | SAVYSCARKTISSVVDFYFDYWGQGTTVTGGGSGGGSGGGSGGG |
| | | SELVLTQSPKFMSTSVGDRVSVTCKASQNVGTNVAWYQQKPGQS |
| | | PKPLIYSATYRNSGVPDRFTGSGSGTDFTLTITNVQSKDLADYFCQY |
| | | NRYPYTSFFFTKLEIKRRS |
| mCAR1 | 195 | QVQLLESGAELVRPGSSVKISCKASGYAFSSYWMNWVKQRPGQG |
| Full-aa | | LEWIGQIYPGDGDTNYNGKFKGQATLTADKSSSTAYMQLSGLTSED |
| | | SAVYSCARKTISSVVDFYFDYWGQGTTVTGGGSGGGSGGGSGGG |
| | | SELVLTQSPKFMSTSVGDRVSVTCKASQNVGTNVAWYQQKPGQS |
| | | PKPLIYSATYRNSGVPDRFTGSGSGTDFTLTITNVQSKDLADYFCQY |
| | | NRYPYTSFFFTKLEIKRRSKIEVMYPPPYLDNEKSNGTIIHVKGKHLC |
| | | PSPLFPGPSKPFWVLVVVGGVLACYSLLVTVAFIIFWVRSKRSRLLH |
| | | SDYMNMTPRRPGPTRKHYQPYAPPRDFAAYRSRVKFSRSADAPA |
| | | YQQGQNQLYNELNLGRREEYDVLDKRRGRDPEMGGKPRRKNPQ |
| | | EGLYNELQKDKMAEAYSEIGMKGERRRGKGHDGLYQGLSTATKDT |
| | | YDALHMQALPPR |
| mCAR2 | 196 | DIQMTQTTSSLSASLGDRVTISCRASQDISKYLNWYQQKPDGTVKL |
| scFv | | LIYHTSRLHSGVPSRFSGSGSGTDYSLTISNLEQEDIATYFCQQGNT |
| | | LPYTFGGGTKLEITGSTSGSGKPGSGEGSTKGEVKLQESGPGLVA |
| | | PSQSLSVTCTVSGVSLPDYGVSWIRQPPRKGLEWLGVIWGSETTY |
| | | YNSALKSRLTIIKDNSKSQVFLKMNSLQTDDTAIYYCAKHYYYGGSY |
| | | AMDYWGQGTSVTVSSE |
| mCAR2 | 197 | DIQMTQTTSSLSASLGDRVTISCRASQDISKYLNWYQQKPDGTVKL |
| CAR-aa | | LIYHTSRLHSGVPSRFSGSGSGTDYSLTISNLEQEDIATYFCQQGNT |
| | | LPYTFGGGTKLEITGSTSGSGKPGSGEGSTKGEVKLQESGPGLVA |
| | | PSQSLSVTCTVSGVSLPDYGVSWIRQPPRKGLEWLGVIWGSETTY |
| | | YNSALKSRLTIIKDNSKSQVFLKMNSLQTDDTAIY |
| | | YCAKHYYYGGSYAMDYWGQGTSVTVSSESKYGPPCPPCPMFWVL |
| | | VVVGGVLACYSLLVTVAFIIFWVKRGRKKLLYIFKQPFMRPVQTTQE |
| | | EDGCSCRFEEEEGGCELRVKFSRSADAPAYQQGQNQLYNELNLG |
| | | RREEYDVLDKRRGRDPEMGGKPRRKNPQEGLYNELQKDKMAEAY |
| | | SEIGMKGERRRGKGHDGLYQGLSTATKDTYDALHMQALPPRL |
| mCAR2 | 198 | DIQMTQTTSSLSASLGDRVTISCRASQDISKYLNWYQQKPDGTVKL |
| Full-aa | | LIYHTSRLHSGVPSRFSGSGSGTDYSLTISNLEQEDIATYFCQQGNT |
| | | LPYTFGGGTKLEITGSTSGSGKPGSGEGSTKGEVKLQESGPGLVA |
| | | PSQSLSVTCTVSGVSLPDYGVSWIRQPPRKGLEWLGVIWGSETTY |
| | | YNSALKSRLTIIKDNSKSQVFLKMNSLQTDDTAIYYCAKHYYYGGSY |
| | | AMDYWGQGTSVTVSSESKYGPPCPPCPMFWVLVVVGGVLACYSL |
| | | LVTVAFIIFWVKRGRKKLLYIFKQPFMRPVQTTQEEDGCSCRFEEEE |
| | | GGCELRVKFSRSADAPAYQQGQNQLYNELNLGRREEYDVLDKRR |
| | | GRDPEMGGKPRRKNPQEGLYNELQKDKMAEAYSEIGMKGERRRG |
| | | KGHDGLYQGLSTATKDTYDALHMQALPPRLEGGGEGRGSLLTCGD |
| | | VEENPGPRMLLLVTSLLLCELPHPAFLLIPRKVCNGIGIGEFKDSLSI |
| | | NATNIKHFKNCTSISGDLHILPVAFRGDSFTHTPPLDPQELDILKTVK |
| | | EITGFLLIQAWPENRTDLHAFENLEIIRGRTKQHGQFSLAVVSLNITS |
| | | LGLRSLKEISDGDVIISGNKNLCYANTINWKKLFGTSGQKTKIISNRG |
| | | ENSCKATGQVCHALCSPEGCWGPEPRDCVSCRNVSRGRECVDK |
| | | CNLLEGEPREFVENSECIQCHPECLPQAMNITCTGRGPDNCIQCAH |
| | | YIDGPHCVKTCPAGVMGENNTLVWKYADAGHVCHLCHPNCTYGC |
| | | TGPGLEGCPTNGPKIPSIATGMVGALLLLLVVALGIGLFM |
| mCAR3 | 199 | DIQMTQTTSSLSASLGDRVTISCRASQDISKYLNWYQQKPDGTVKL |
| scFv | | LIYHTSRLHSGVPSRFSGSGSGTDYSLTISNLEQEDIATYFCQQGNT |
| | | LPYTFGGGTKLEITGSTSGSGKPGSGEGSTKGEVKLQESGPGLVA |
| | | PSQSLSVTCTVSGVSLPDYGVSWIRQPPRKGLEWLGVIWGSETTY |
| | | YNSALKSRLTIIKDNSKSQVFLKMNSLQTDDTAIYYCAKHYYYGGSY |
| | | AMDYWGQGTSVTVSS |
| mCAR3 | 200 | DIQMTQTTSSLSASLGDRVTISCRASQDISKYLNWYQQKPDGTVKL |
| Full-aa | | LIYHTSRLHSGVPSRFSGSGSGTDYSLTISNLEQEDIATYFCQQGNT |
| | | LPYTFGGGTKLEITGSTSGSGKPGSGEGSTKGEVKLQESGPGLVA |
| | | PSQSLSVTCTVSGVSLPDYGVSWIRQPPRKGLEWLGVIWGSETTY |
| | | YNSALKSRLTIIKDNSKSQVFLKMNSLQTDDTAIYYCAKHYYYGGSY |
| | | AMDYWGQGTSVTVSSAAAIEVMYPPPYLDNEKSNGTIIHVKGKHLC |
| | | PSPLFPGPSKPFWVLVVVGGVLACYSLLVTVAFIIFWVRSKRSRLLH |
| | | SDYMNMTPRRPGPTRKHYQPYAPPRDFAAYRSRVKFSRSADAPA |
| | | YQQGQNQLYNELNLGRREEYDVLDKRRGRDPEMGGKPRRKNPQ |
| | | EGLYNELQKDKMAEAYSEIGMKGERRRGKGHDGLYQGLSTATKDT |
| | | YDALHMQALPPR |
| SSJ25-C1 | 216 | QVQLLESGAELVRPGSSVKISCKASGYAFSSYWMNWVKQRPGQG |
| VH | | LEWIGQIYPGDGDTNYNGKFKGQATLTADKSSSTAYMQLSGLTSED |
| sequence | | SAVYSCARKTISSVVDFYFDYWGQGTTVT |
| SSJ25-C1 | 217 | ELVLTQSPKFMSTSVGDRVSVTCKASQNVGTNVAWYQQKPGQSP |
| VL | | KPLIYSATYRNSGVPDRFTGSGSGTDFTLTITNVQSKDLADYFYFCQ |
| sequence | | YNRYPYTSGGGTKLEIKRRS |

[0654] Full CAR constructs using SEQ ID NOs: 188, 194, 196 and 209 are shown in SEQ ID NOs: 148, 195, 197, 198 and 200.

[0655] The present disclosure encompasses the use of CAR molecules of any one of SEQ ID NOs:122-133, 148, 195, 197, 198 and 200 in the methods and combinations of the disclosure. In specific aspects, a CAR construct of the disclosure comprises a scFv domain selected from the group consisting of SEQ ID NOS:96-107 or an scFV domain of SEQ ID NO:149, wherein the scFv may be preceded by an optional leader sequence, and followed by an optional hinge sequence, a transmembrane region and a CD3-zeta sequence, wherein the domains are contiguous with and in the same reading frame to form a single fusion protein.

[0656] A CAR molecule construct of the disclosure can be encoded by a nucleic acid construct comprising the nucleotide sequence of any one of SEQ ID NOS:175-189. In one aspect the nucleic acid sequence of a CAR construct comprises SEQ ID NO:175. In one aspect the nucleic acid sequence of a CAR construct comprises SEQ ID NO:176. In one aspect the nucleic acid sequence of a CAR construct comprises SEQ ID NO:177. In one aspect the nucleic acid sequence of a CAR construct comprises SEQ ID NO:178. In one aspect the nucleic acid sequence of a CAR construct comprises SEQ ID NO:179. In one aspect the nucleic acid sequence of a CAR construct comprises SEQ ID NO:180. In one aspect the nucleic acid sequence of a CAR construct comprises SEQ ID NO:181. In one aspect the nucleic acid sequence of a CAR construct comprises SEQ ID NO:182. In one aspect the nucleic acid sequence of a CAR construct comprises SEQ ID NO:183. In one aspect the nucleic acid sequence of a CAR construct comprises SEQ ID NO:184. In one aspect the nucleic acid sequence of a CAR construct comprises SEQ ID NO:185. In one aspect the nucleic acid sequence of a CAR construct comprises SEQ ID NO:186. In one aspect the nucleic acid sequence of a CAR construct is SEQ ID NO:187. In one aspect the nucleic acid sequence of a CAR construct comprises SEQ ID NO:188. In one aspect the nucleic acid sequence of a CAR construct comprises SEQ ID NO:189.

[0657] Full-length CAR sequences are also provided herein as SEQ ID NOS: 122-133 and 148, as shown in Table 16 (e.g., CTL119) and Table 17 (e.g., CTL019).

[0658] Exemplary sequences of various scFv fragments and other CAR components are provided herein. It is noted that these CAR components without a leader sequence, are also provided herein.

[0659] In one aspect, a CAR molecule is encoded by a nucleic acid molecule comprising the nucleic acid sequence encoding an anti-CD19 binding domain, e.g., described herein, that is contiguous with and in the same reading frame as a nucleic acid sequence encoding an intracellular signaling domain. In one aspect, the anti-CD19 binding domain is selected from one or more of SEQ ID NOS:96-107 and 148. In one aspect, the anti-CD19 binding domain is encoded by a nucleotide residues 64 to 813 of the sequence provided in one or more of SEQ ID NOS:151-166 and 187. In one aspect, the anti-CD19 binding domain is encoded by a nucleotide residues 64 to 813 of SEQ ID NO:156. In one aspect, the anti-CD19 binding domain is encoded by a nucleotide residues 64 to 813 of SEQ ID NO:152. In one aspect, the anti-CD19 binding domain is encoded by a nucleotide residues 64 to 813 of SEQ ID NO:153. In one aspect, the anti-CD19 binding domain is encoded by a nucleotide residues 64 to 813 of SEQ ID NO:154. In one aspect, the anti-CD19 binding domain is encoded by a nucleotide residues 64 to 813 of SEQ ID NO:155. In one aspect, the anti-CD19 binding domain is encoded by a nucleotide residues 64 to 813 of SEQ ID NO:156. In one aspect, the anti-CD19 binding domain is encoded by a nucleotide residues 64 to 813 of SEQ ID NO:157. In one aspect, the anti-CD19 binding domain is encoded by a nucleotide residues 64 to 813 of SEQ ID NO:158. In one aspect, the anti-CD19 binding domain is encoded by a nucleotide residues 64 to 813 of SEQ ID NO:159. In one aspect, the anti-CD19 binding domain is encoded by a nucleotide residues 64 to 813 of SEQ ID NO:160. In one aspect, the anti-CD19 binding domain is encoded by a nucleotide residues 64 to 813 of SEQ ID NO:161. In one aspect, the anti-CD19 binding domain is encoded by a nucleotide residues 64 to 813 of SEQ ID NO:162.

[0660] In further aspects a CAR molecule comprises an amino acid sequence having at least 85, 90, 95, 96, 97, 98, 99 or 100% identity to the scFv portion of 1928z (see, e.g., U.S. Pat. No. 10,124,023, which is incorporated by reference herein) and/or has the amino acid sequences of the heavy and light chain CDRs of 1928z. In some embodiments, the CD19 CAR molecule comprises the entire amino acid sequence of the 1928z (with or without its leader sequence) or an amino acid sequence having at least 85, 90, 95, 96, 97, 98, 99 or 100% identity to the sequence of 1928z (with or without its leader sequence), reproduced below:

(SEQ ID NO: 201)
MALPVTALLLPLALLLHAEVKLQQSGAELVRPGSSVKISCKASGYAFSS
YWMNWVKQRPGQGLEWIGQIYPGDGDTNYNGKFKGQATLTADKSSSTAY
MQLSGLTSEDSAVYFCARKTISSVVDFYFDYWGQGTTVTVSSGGGGSGG
GGSGGGGSDIELTQSPKFMSTSVGDRVSVTCKASQNVGTNVAWYQQKPG
QSPKPLIYSATYRNSGVPDRFTGSGSGTDFTLTITNVQSKDLADYFCQQ
YNRYPYTSGGGTKLEIKRAAAIEVMYPPPYLDNEKSNGTIIHVKGKHLC
PSPLFPGPSKPFWVLVVVGGVLACYSLLVTVAFIIFWVRSKRSRLLHSD
YMNMTPRRPGPTRKHYQPYAPPRDFAAYRSRVKFSRSAEPPAYQQGQNQ
LYNELNLGRREEYDVLDKRRGRDPEMGGKPRRKNPQEGLYNELQKDKMA
EAYSEIGMKGERRRGKGHDGLYQGLSTATKDTYDALHMQALPPRX

[0661] An exemplary nucleic acid sequence encoding a 1928z polypeptide of SEQ ID NO:201 is reproduced below:

(SEQ ID NO: 202)
ccatggctctcccagtgactgccctactgcttcccctagcgcttctcct
gcatgcagaggtgaagctgcagcagtctggggctgagctggtgaggcct
gggtcctcagtgaagatttcctgcaaggcttctggctatgcattcagta
gctactggatgaactgggtgaagcagaggcctggacagggtcttgagtg
gattggacagatttatcctggagatggtgatactaactacaatggaaag
ttcaagggtcaagccacactgactgcagacaaatcctccagcacagcct
acatgcagctcagcggcctaacatctgaggactctgcggtctatttctg
tgcaagaaagaccattagttcggtagtagatttctactttgactactgg
ggccaagggaccacggtcaccgtctcctcaggtggaggtggatcaggtg
gaggtggatctggtggaggtggatctgacattgagctcacccagtctcc
aaaattcatgtccacatcagtaggagacagggtcagcgtcacctgcaag
gccagtcagaatgtgggtactaatgtagcctggtatcaacagaaaccag
gacaatctcctaaaccactgatttactcggcaacctaccggaacagtgg
agtccctgatcgcttcacaggcagtggatctgggacagatttcactctc
accatcactaacgtgcagtctaaagacttggcagactatttctgtcaac
aatataacaggtatccgtacacgtccggaggggggaccaagctggagat
caaacgggcggccgcaattgaagttatgtatcctcctccttacctagac
aatgagaagagcaatggaaccattatccatgtgaaagggaaacaccttt
gtccaagtcccctatttcccggaccttctaagcccttttgggtgctggt
ggtggttggtggagtcctggcttgctatagcttgctagtaacagtggcc
tttattattttctgggtgaggagtaagaggagcaggctcctgcacagtg
actacatgaacatgactccccgccgccccgggcccacccgcaagcatta
ccagccctatgccccaccacgcgacttcgcagcctatcgctccagagtg
aagttcagcaggagcgcagagccccccgcgtaccagcagggccagaacc
agctctataacgagctcaatctaggacgaagagaggagtacgatgtttt
ggacaagagacgtggccgggaccctgagatggggggaaagccgagaagg
aagaaccctcaggaaggcctgtacaatgaactgcagaaagataagatgg
cggaggcctacagtgagattgggatgaaaggcgagcgccggaggggcaa
ggggcacgatggcctttaccagggtctcagtacagccaccaaggacacc
tacgacgcccttcacatgcaggccctgccccctcgcg

### 7.3.5. CAR Encoding Nucleic Acids

[0662] Nucleic acid molecules encoding the CAR molecules useful for the methods disclosed herein, for example the CAR molecules described in Section 7.3.4 can be obtained using recombinant methods known in the art, such as, for example by screening libraries from cells expressing the nucleic acid molecule, by deriving the nucleic acid molecule from a vector known to include the same, or by isolating directly from cells and tissues containing the same, using standard techniques. Alternatively, the nucleic acid of interest can be produced synthetically, rather than cloned.

[0663] A number of viral based systems have been developed for gene transfer into mammalian cells. For example, retroviruses provide a convenient platform for gene delivery systems. A selected gene can be inserted into a vector and packaged in retroviral particles using techniques known in the art. The recombinant virus can then be isolated and delivered to cells of the subject either in vivo or ex vivo. A number of retroviral systems are known in the art. In some embodiments, adenovirus vectors are used. A number of adenovirus vectors are known in the art. In one embodiment, lentivirus vectors are used.

[0664] In brief summary, the expression of natural or synthetic nucleic acids encoding CARs is typically achieved by operably linking a nucleic acid encoding the CAR polypeptide or portions thereof to a promoter, and incorporating the construct into an expression vector. The vectors can be suitable for replication and integration eukaryotes. Typical cloning vectors contain transcription and translation terminators, initiation sequences, and promoters useful for regulation of the expression of the desired nucleic acid sequence.

### 7.3.6. Administration of CAR Molecules

[0665] CAR molecules are typically administered as a population of effector cells, for example a population of T cells, engineered to express a CD19 CAR molecule.

[0666] The effector cell can be transformed with the CAR such that the CAR molecule is expressed on the cell surface. Suitable CAR molecules are described in Section 7.3.4. Populations of cells, e.g., immune effector cells, that express are CAR molecule are referred to herein as “CAR compositions”. CAR compositions can be administered to a subject parenterally, most preferably as an infusion. The cells may be administered as a single infusion or in multiple infusions over a range of time.

[0667] In some embodiments, the cell (e.g., T cell) is transduced with a viral vector encoding a CAR. Suitable viral vectors are retroviral vectors and lentiviral vectors In some such embodiments, the cell may stably express the CAR.

[0668] In other embodiments, the cell (e.g., T cell) is transfected with a nucleic acid, e.g., mRNA, cDNA, DNA, encoding a CAR. In some such embodiments, the cell may transiently express the CAR.

[0669] In certain aspects, the CAR composition comprises a CAR molecule having the sequence of SEQ ID NO:149 or SEQ ID NO:97. In certain aspects, the CAR composition comprises a CAR molecule having the sequence of SEQ ID NO:1162 or SEQ ID NO:1160.

[0670] In certain aspects, the CAR composition comprises CTL019.

[0671] In certain aspect, the CAR composition has the USAN or INN designation tisagenlecleucel. Tisagenlecleucel is marketed as KYMRIAH®. See, e.g., KYMRIAH® prescribing information, available at www.pharma.us.novartis.com/sites/www.pharma.us.novartis.com/files/kymriah.pdf.

[0672] In other aspects, the CAR composition has the USAN or INN designation axicabtagene ciloleucel. Axicabtagene ciloleucel is marketed as YESCARTA®. See, e.g., YESCARTA® prescribing information, available at www.yescarta.com/files/yescarta-pi.pdf. In other aspects, the CAR composition has the USAN designation brexucabtagene autoleucel. Brexucabtagene autoleucel is marketed as TECARTUS™. See, e.g., TECARTUS™ prescribing information, available at www.gilead.com/-/media/files/pdfs/medicines/oncology/tecartus/tecartus-pi.pdf. In other aspects, the CAR composition has the USAN or INN designation lisocabtagene maraleucel. Lisocabtagene maraleucel is marketed as BREYANZI®. See, e.g., BREYANZI® prescribing information, available at packageinserts.bms.com/pi/pi_breyanzi.pdf.

### 7.4. B Cell Targeting Agents

[0673] The combinations of the disclosure include a B cell targeting agent. Exemplary B cell targeting agents include BAFFR binding molecules, CD20 binding molecules, CD22 binding molecules, and BAFF binding molecules.

### 7.4.1. BAFFR Binding Molecules

[0674] In some embodiment, the B cell targeting agent is a BAFFR binding molecule, for example, a BAFFR antibody. Antibodies against BAFFR (“anti-BAFFR antibodies”) are known from e.g. WO 2010/007082 and include antibodies which are characterized by comprising a VH domain with the amino acid sequence of SEQ ID NO: 59 and a VL domain with the amino acid sequence of SEQ ID NO: 60. The antibody MOR6654 is one such antibody (IgG1 kappa). It has the heavy chain amino acid sequence of SEQ ID NO: 61 and the light chain amino acid sequence of SEQ ID NO: 62. This antibody may be expressed from SEQ ID NOs: 249 and 250, preferably in a host cell which lacks fucosyl-transferase, for example in a mammalian cell line with an inactive FUT8 gene (e.g. FUT8^{-/-}), to provide a functional non-fucosylated anti-BAFFR antibody with enhanced ADCC. This antibody is referred to hereafter as MOR6654B or VAY736, or under its international non-proprietary name ianalumab. Alternative ways to produce non-fucosylated antibodies are known in the art.

TABLE 18
ianalumab sequences

| | | SEQ ID |
|---|---|---|
| Portion | Amino acid or Nucleotide Sequence | NO: |
| CDR-H1 | GDSVSSNSAAWG | 53 |
| CDR-H2 | RIYYRSKWYNSYAVSVKS | 54 |
| CDR-H3 | YDWVPKIGVFDS | 55 |
| CDR-L1 | RASQFISSSYLS | 56 |
| CDR-L2 | GSSSRAT | 57 |
| CDR-L3 | QQLYSSPMT | 58 |
| VH | QVQLQQSGPGLVKPSQTLSLTCAISGDSVSSNSAAWGWIRQSPGRGLEWL | 59 |
| | GRIYYRSKWYNSYAVSVKSRITINPDTSKNQFSLQLNSVTPEDTAVYYCARY | |
| | DWVPKIGVFDSWGQGTLVTVSS | |
| VL | DIVLTQSPATLSLSPGERATLSCRASQFISSSYLSWYQQKPGQAPRLLIYGS | 60 |
| | SSRATGVPARFSGSGSGTDFTLTISSLEPEDFAVYYCQQLYSSPMTFGQGT | |
| | KVEIK | |
| Heavy | QVQLQQSGPGLVKPSQTLSLTCAISGDSVSSNSAAWGWIRQSPGRGLEWL | 61 |
| Chain | GRIYYRSKWYNSYAVSVKSRITINPDTSKNQFSLQLNSVTPEDTAVYYCARY | |
| | DWVPKIGVFDSWGQGTLVTVSSASTKGPSVFPLAPSSKSTSGGTAALGCLV | |
| | KDYFPEPVTVSWNSGALTSGVHTFPAVLQSSGLYSLSSVVTVPSSSLGTQT | |
| | YICNVNHKPSNTKVDKRVEPKSCDKTHTCPPCPAPELLGGPSVFLFPPKPK | |
| | DTLMISRTPEVTCVVVDVSHEDPEVKFNWYVDGVEVHNAKTKPREEQYNST | |
| | YRVVSVLTVLHQDWLNGKEYKCKVSNKALPAPIEKTISKAKGQPREPQVYTL | |
| | PPSREEMTKNQVSLTCLVKGFYPSDIAVEWESNGQPENNYKTTPPVLDSDG | |
| | SFFLYSKLTVDKSRWQQGNVFSCSVMHEALHNHYTQKSLSLSPGK | |
| Light Chain | DIVLTQSPATLSLSPGERATLSCRASQFISSSYLSWYQQKPGQAPRLLIYGS | 62 |
| | SSRATGVPARFSGSGSGTDFTLTISSLEPEDFAVYYCQQLYSSPMTFGQGT | |
| | KVEIKRTVAAPSVFIFPPSDEQLKSGTASVVCLLNNFYPREAKVQWKVDNAL | |
| | QSGNSQESVTEQDSKDSTYSLSSTLTLSKADYEKHKVYACEVTHQGLSSPV | |
| | TKSFNRGEC | |
| Full length | ATGGCCTGGGTGTGGACCCTGCCCTTCCTGATGGCCGCTGCCCAGTCA | 249 |
| nucleotide | GTGCAGGCCCAGGTGCAGCTGCAGCAGAGCGGCCCAGGCCTGGTCAA | |
| sequence | GCCCTCTCAGACCCTGTCACTGACCTGCGCCATTTCAGGCGACAGCGTG | |
| (including | AGCAGCAACAGCGCCGCCTGGGGCTGGATCAGGCAGAGCCCCGGTAG | |
| leader | GGGCCTGGAATGGCTGGGCAGGATCTACTACAGGTCCAAGTGGTACAA | |
| sequence | CAGCTACGCCGTGAGCGTGAAGAGCAGGATCACCATCAACCCTGACAC | |
| and | CAGCAAGAACCAGTTCTCACTGCAGCTCAACAGCGTGACCCCCGAGGA | |
| constant | CACCGCCGTGTACTACTGCGCCAGATACGACTGGGTGCCCAAGATCGG | |
| part) of | CGTGTTCGACAGCTGGGGCCAGGGCACCCTGGTGACCGTGTCAAGCGC | |
| heavy | CAGCACCAAGGGCCCCAGCGTGTTCCCCCTGGCCCCCAGCAGCAAGAG | |
| chain; nt 1- | CACCAGCGGCGGCACAGCCGCCCTGGGCTGCCTGGTGAAGGACTACTT | |
| 57 = | CCCCGAGCCCGTGACCGTGTCCTGGAACAGCGGAGCCCTGACCTCCGG | |
| leader; nt | CGTGCACACCTTCCCCGCCGTGCTGCAGAGCAGCGGCCTGTACAGCCT | |
| 58-429 = | GTCCAGCGTGGTGACAGTGCCCAGCAGCAGCCTGGGCACCCAGACCTA | |
| VH; nt 430- | CATCTGCAACGTGAACCACAAGCCCAGCAACACCAAGGTGGACAAGAGA | |
| 1419 = | GTGGAGCCCAAGAGCTGCGACAAGACCCACACCTGCCCCCCCTGCCCA | |
| constant | GCCCCAGAGCTGCTGGGCGGACCCTCCGTGTTCCTGTTCCCCCCCAAG | |
| region | CCCAAGGACACCCTGATGATCAGCAGGACCCCCGAGGTGACCTGCGTG | |
| (hlgG1) | GTGGTGGACGTGAGCCACGAGGACCCAGAGGTGAAGTTCAACTGGTAC | |
| | GTGGACGGCGTGGAGGTGCACAACGCCAAGACCAAGCCCAGAGAGGA | |
| | GCAGTACAACAGCACCTACAGGGTGGTGTCCGTGCTGACCGTGCTGCA | |
| | CCAGGACTGGCTGAACGGCAAGGAATACAAGTGCAAGGTCTCCAACAA | |
| | GGCCCTGCCAGCCCCCATCGAAAAGACCATCAGCAAGGCCAAGGGCCA | |
| | GCCACGGGAGCCCCAGGTGTACACCCTGCCCCCCTCCCGGGAGGAGAT | |
| | GACCAAGAACCAGGTGTCCCTGACCTGTCTGGTGAAGGGCTTCTACCCC | |
| | AGCGACATCGCCGTGGAGTGGGAGAGCAACGGCCAGCCCGAGAACAAC | |
| | TACAAGACCACCCCCCCAGTGCTGGACAGCGACGGCAGCTTCTTCCTGT | |
| | ACAGCAAGCTGACCGTGGACAAGTCCAGGTGGCAGCAGGGCAACGTGT | |
| | TCAGCTGCAGCGTGATGCACGAGGCCCTGCACAACCACTACACCCAGA | |
| | AGAGCCTGAGCCTGTCCCCCGGCAAG | |
| Full length | ATGAGCGTGCTGACCCAGGTGCTGGCTCTGCTGCTGCTGTGGCTGACC | 250 |
| nucleotide | GGCACCAGATGCGATATCGTGCTGACACAGAGCCCCGCCACCCTGAGC | |
| sequence | CTGAGCCCAGGCGAGAGGGCCACCCTGTCCTGCAGGGCCAGCCAGTTT | |
| (including | ATCAGCAGCAGCTACCTGTCCTGGTATCAGCAGAAGCCCGGCCAGGCC | |
| leader | CCTAGACTGCTGATCTACGGCAGCTCCTCTCGGGCCACCGGCGTGCCC | |
| sequence | GCCAGGTTCAGCGGCAGCGGCTCCGGCACCGACTTCACCCTGACAATC | |
| and | AGCAGCCTGGAGCCCGAGGACTTCGCCGTGTACTACTGCCAGCAGCTG | |
| constant | TACAGCTCACCCATGACCTTCGGCCAGGGCACCAAGGTGGAGATCAAG | |
| part) of light | CGTACGGTGGCCGCTCCCAGCGTGTTCATCTTCCCCCCCAGCGACGAG | |
| chain; nt 1- | CAGCTGAAGAGCGGCACCGCCAGCGTGGTGTGCCTGCTGAACAACTTC | |
| 60 = | TACCCCCGGGAGGCCAAGGTGCAGTGGAAGGTGGACAACGCCCTGCAG | |
| leader; nt | AGCGGCAACAGCCAGGAGAGCGTCACCGAGCAGGACAGCAAGGACTCC | |
| 61-384 | ACCTACAGCCTGAGCAGCACCCTGACCCTGAGCAAGGCCGACTACGAG | |
| VL; nt 385- | AAGCATAAGGTGTACGCCTGCGAGGTGACCCACCAGGGCCTGTCCAGC | |
| 705 = | CCCGTGACCAAGAGCTTCAACAGGGGCGAGTGC | |
| constant | | |
| region | | |
| (hkappa) | | |

[0675] Table 19 lists CDR, VH, and VL sequences of further exemplary BAFF binders that can be used in the methods and combinations of the disclosure.

TABLE 19
BAFFR Binder Sequences

| Binder | Portion | Sequence | SEQ ID NO: |
|---|---|---|---|
| BAFFR-1 | CDR-H1 | GDSVSSNSAAWG | 53 |
| | CDR-H2 | RIYYRSKWYNSYAVSV | 224 |
| | CDR-H3 | YDWVPKIGVFDS | 55 |
| | VH | QVQLQQSGPGLVKPSQTLSLTCAISGDSVSSNSAAWGWIRQSP | 59 |
| | | GRGLEWLGRIYYRSKWYNSYAVSVKSRITINPDTSKNQFSLQLN | |
| | | SVTPEDTAVYYCARYDWVPKIGVFDSWGQGTLVTVSS | |
| | CDR-L1 | RASQMIDLRYLS | 225 |
| | CDR-L2 | LLIYGSSSRAT | 226 |
| | CDR-L3 | QQLYSSPM | 227 |
| | VL | DIVLTQSPATLSLSPGERATLSCRASQMIDLRYLSWYQQKPGQA | 228 |
| | | PRLLIYGSSSRATGVPARFSGSGSGTDFTLTISSLEPEDFAVYYC | |
| | | QQLYSSPMTFGQGTKVEIKRT | |
| BAFFR-2 | CDR-H1 | GDSVSSNSAAWG | 53 |
| | CDR-H2 | RIYYRSKWYNSYAVSV | 224 |
| | CDR-H3 | YDWVPKIGVFDS | 55 |
| | VH | QVQLQQSGPGLVKPSQTLSLTCAISGDSVSSNSAAWGWIRQSP | 59 |
| | | GRGLEWLGRIYYRSKWYNSYAVSVKSRITINPDTSKNQFSLQLN | |
| | | SVTPEDTAVYYCARYDWVPKIGVFDSWGQGTLVTVSS | |
| | CDR-L1 | RASQFISSSYLS | 56 |
| | CDR-L2 | LLIYGSSSRAT | 226 |
| | CDR-L3 | QQLYSSPM | 227 |
| | VL | DIVLTQSPATLSLSPGERATLSCRASQFISSSYLSWYQQKPGQA | 1338 |
| | | PRLLIYGSSSRATGVPARFSGSGSGTDFTLTISSLEPEDFAVYYC | |
| | | QQLYSSPMTFGQGTKVEIKRT | |
| BAFFR-3 | CDR-H1 | GDSVSSNSAAWG | 53 |
| | CDR-H2 | RIYYRSKWYNNYAVSV | 229 |
| | CDR-H3 | YKWVPKIGVFDS | 230 |
| | VH | QVQLQQSGPGLVKPSQTLSLTCAISGDSVSSNSAAWGWIRQSP | 231 |
| | | GRGLEWLGRIYYRSKWYNNYAVSVKSRITINPDTSKNQFSLQLN | |
| | | SVTPEDTAVYYCARYKWVPKIGVFDSWGQGTLVTVSS | |
| | CDR-L1 | RASQMIDLRYLS | 225 |
| | CDR-L2 | LLIYGSSSRAT | 226 |
| | CDR-L3 | QQFYSSPL | 232 |
| | VL | DIVLTQSPATLSLSPGERATLSCRASQMIDLRYLSWYQQKPGQA | 233 |
| | | PRLLIYGSSSRATGVPARFSGSGSGTDFTLTISSLEPEDFAVYYC | |
| | | QQFYSSPLTFGQGTKVEIKRT | |
| BAFFR-4 | CDR-H1 | GDSVSSNSAAWG | 53 |
| | CDR-H2 | RIYYRSKWYNSYAVSV | 224 |
| | CDR-H3 | YQWVPKIGVFDS | 234 |
| | VH | QVQLQQSGPGLVKPSQTLSLTCAISGDSVSSNSAAWGWIRQSP | 235 |
| | | GRGLEWLGRIYYRSKWYNSYAVSVKSRITINPDTSKNQFSLQLN | |
| | | SVTPEDTAVYYCARYQWVPKIGVFDSWGQGTLVTVSS | |
| | CDR-L1 | RASQEILPEYLS | 236 |
| | CDR-L2 | LLIYGSSSRAT | 226 |
| | CDR-L3 | QQFYSSPL | 232 |
| | VL | DIVLTQSPATLSLSPGERATLSCRASQEILPEYLSWYQQKPGQA | 237 |
| | | PRLLIYGSSSRATGVPARFSGSGSGTDFTLTISSLEPEDFAVYYC | |
| | | QQFYSSPLTFGQGTKVEIKRT | |
| BAFFR-5 | CDR-H1 | GDSVSSNSAAWG | 53 |
| | CDR-H2 | RIYYRSKWYNSYAVSV | 224 |
| | CDR-H3 | YDWVPKIGVFDL | 238 |
| | VH | QVQLQQSGPGLVKPSQTLSLTCAISGDSVSSNSAAWGWIRQSP | 239 |
| | | GRGLEWLGRIYYRSKWYNSYAVSVKSRITINPDTSKNQFSLQLN | |
| | | SVTPEDTAVYYCARYDWVPKIGVFDLWGQGTLVTVSS | |
| | CDR-L1 | RASQWIEAGYLS | 240 |
| | CDR-L2 | LLIYGSSSRAT | 226 |
| | CDR-L3 | QQLYSSPM | 227 |
| | VL | DIVLTQSPATLSLSPGERATLSCRASQWIEAGYLSWYQQKPGQA | 241 |
| | | PRLLIYGSSSRATGVPARFSGSGSGTDFTLTISSLEPEDFAVYYC | |
| | | QQLYSSPMTFGQGTKVEIKRT | |
| BAFFR-6 | CDR-H1 | GDSVSSNSAAWG | 53 |
| | CDR-H2 | RIYYRSKWWNDYAVSV | 242 |
| | CDR-H3 | YDWVPKIGVFDG | 243 |
| | VH | QVQLQQSGPGLVKPSQTLSLTCAISGDSVSSNSAAWGWIRQSP | 244 |
| | | GRGLEWLGRIYYRSKWWNDYAVSVKSRITINPDTSKNQFSLQLN | |
| | | SVTPEDTAVYYCARYDWVPKIGVFDGWGQGTLVTVSS | |
| | CDR-L1 | RASQMIDLRYLS | 225 |
| | CDR-L2 | LLIYGSSSRAT | 226 |
| | CDR-L3 | QQFYSSPL | 232 |
| | VL | DIVLTQSPATLSLSPGERATLSCRASQMIDLRYLSWYQQKPGQA | 233 |
| | | PRLLIYGSSSRATGVPARFSGSGSGTDFTLTISSLEPEDFAVYYC | |
| | | QQFYSSPLTFGQGTKVEIKRT | |
| BAFFR-7 | CDR-H1 | GDSVSSNSAAWG | 53 |
| | CDR-H2 | RIYYRSKWYNDYAVSVKS | 245 |
| | CDR-H3 | YDWVPKIGVFDS | 55 |
| | VH | QVQLQQSGPGLVKPSQTLSLTCAISGDSVSSNSAAWGWIRQSP | 246 |
| | | GRGLEWLGRIYYRSKWYNDYAVSVKSRITINPDTSKNQFSLQLN | |
| | | SVTPEDTAVYYCARYDWVPKIGVFDSWGQGTLVTVSS | |
| | CDR-L1 | RASQFISSSYLS | 56 |
| | CDR-L2 | LLIYGSSSRAT | 226 |
| | CDR-L3 | QQVYDIPIT | 247 |
| | VL | DIVLTQSPATLSLSPGERATLSCRASQFISSSYLSWYQQKPGQA | 248 |
| | | PRLLIYGSSSRATGVPARFSGSGSGTDFTLTISSLEPEDFAVYYC | |
| | | QQVYDIPITFGQGTKVEIKRT | |

[0676] In certain aspects, a BAFFR binding molecule comprises heavy chain and light chain CDRs having the amino acid sequences of any one of BAFFR-1 to BAFFR-7 as set forth in Table 19. In a specific embodiment, a BAFFR binding molecule comprises the heavy and light chain CDRs of BAFFR-1 as set forth in Table 19. In a specific embodiment, a BAFFR binding molecule comprises the heavy and light chain CDRs of BAFFR-2 as set forth in Table 19. In a specific embodiment, a BAFFR binding molecule comprises the heavy and light chain CDRs of BAFFR-3 as set forth in Table 19. In a specific embodiment, a BAFFR binding molecule comprises the heavy and light chain CDRs of BAFFR-4 as set forth in Table 19. In a specific embodiment, a BAFFR binding molecule comprises the heavy and light chain CDRs of BAFFR-5 as set forth in Table 19. In a specific embodiment, a BAFFR binding molecule comprises the heavy and light chain CDRs of BAFFR-6 as set forth in Table 19. In a specific embodiment, a BAFFR binding molecule comprises the heavy and light chain CDRs of BAFFR-7 as set forth in Table 19.

[0677] In certain embodiments, a BAFFR binding molecule comprises a heavy chain variable region and a light chain variable region having the VH and VL amino acid sequences of BAFFR-1 as set forth in Table 19. In certain embodiments, a BAFFR binding molecule comprises a heavy chain variable region and a light chain variable region having the VH and VL amino acid sequences of BAFFR-2 as set forth in Table 19. In certain embodiments, a BAFFR binding molecule comprises a heavy chain variable region and a light chain variable region having the VH and VL amino acid sequences of BAFFR-3 as set forth in Table 19. In certain embodiments, a BAFFR binding molecule comprises a heavy chain variable region and a light chain variable region having the VH and VL amino acid sequences of BAFFR-4 as set forth in Table 19. In certain embodiments, a BAFFR binding molecule comprises a heavy chain variable region and a light chain variable region having the VH and VL amino acid sequences of BAFFR-5 as set forth in Table 19. In certain embodiments, a BAFFR binding molecule comprises a heavy chain variable region and a light chain variable region having the VH and VL amino acid sequences of BAFFR-6 as set forth in Table 19. In certain embodiments, a BAFFR binding molecule comprises a heavy chain variable region and a light chain variable region having the VH and VL amino acid sequences of BAFFR-7 as set forth in Table 19.

[0678] Additional exemplary BAFFR binding molecules are described in WO 2017/214170.

### 7.4.2. CD20 Binding Molecules

[0679] In certain aspects, the B cell targeting agent is a CD20 binding molecule, e.g., an anti-CD20 antibody. Various CD20 binding molecules are described in the art, for example in U.S. Pat. Nos. 7,422,739 and 7,850,962, WO 2005/103081, WO 2011/100403, WO 2017/185949, and WO 2018/044172. See also, Du et al., 2017, Auto Immun Highlights. 8(1):12. Exemplary CD20 binding molecules that can be used in the methods and combinations of the disclosure include rituximab, ofatumumab, ocrelizumab, veltuzumab, and obinutuzumab. In some embodiments, the CD20 binding molecule is rituximab. In other embodiments, the CD20 binding molecule is ofatumumab. In other embodiments, the CD20 binding molecule is ocrelizumab. In other embodiments, the CD20 binding molecule is veltuzumab. In other embodiments, the CD20 binding molecule is obinutuzumab.

### 7.4.3. CD22 Binding Molecules

[0680] In certain aspects, the B cell targeting agent is a CD22 binding molecule, e.g., an anti-CD22 antibody. Various CD22 binding molecules are described in the art, for example in WO 2009/124109, WO 2017/009476, and WO 2020/185763. See also, Haso et al., 2013, Blood, 121(7): 1165-1174; Wayne et al., 2010, Clin Cancer Res 16(6):1894-1903; Kato et al., 2013, Leuk Res 37(1):83-88. Exemplary CD22 binding molecules that can be used in the methods and combinations of the disclosure include epratuzumab, inotuzumab, and inotuzumab ozogamicin.

### 7.4.4. BAFF Binding Molecules

[0681] In certain aspects, the B cell targeting agent is a BAFF binding molecule, e.g., an anti-BAFF antibody. Various anti-BAFF binding molecules are described in the art, for example in WO 2006/025345 and WO 2016/039801. Exemplary BAFF binding molecules that can be used in the methods and combinations of the disclosure include belimumab, tibulizumab, BR3-Fc, blisibimod and atacicept.

[0682] In some embodiments, the BAFF binding molecule is belimumab. In other embodiments, the BAFF binding molecule is tibulizumab. In other embodiments, the BAFF binding molecule is BR3-Fc. In other embodiments, the BAFF binding molecule is blisibimod. In other embodiments, the BAFF binding molecule is atacicept.

### 7.5. Pharmaceutical Compositions and Combination Administration

[0683] The anti-CD19 agents and B cell targeting agents can be formulated as pharmaceutical compositions containing one or more pharmaceutically acceptable excipients or carriers. To prepare pharmaceutical or sterile compositions, an anti-CD19 agent or B cell targeting agent preparation can be combined with one or more pharmaceutically acceptable excipients and/or carriers. The anti-CD19 agent and B cell targeting agent of a combination are typically formulated as separate pharmaceutical compositions. Each can be provided, for example, in a single dose or multiple dose container.

[0684] For example, formulations of anti-CD19 agents and B cell targeting agents can be prepared by mixing the agents with physiologically acceptable carriers, excipients, or stabilizers in the form of, e.g., lyophilized powders, slurries, aqueous solutions, lotions, or suspensions (see, e.g., Hardman et al., 2001, Goodman and Gilman's The Pharmacological Basis of Therapeutics, McGraw-Hill, New York, N.Y.; Gennaro, 2000, Remington: The Science and Practice of Pharmacy, Lippincott, Williams, and Wilkins, New York, N.Y.; Avis, et al. (eds.), 1993, Pharmaceutical Dosage Forms: General Medications, Marcel Dekker, NY; Lieberman, et al. (eds.), 1990, Pharmaceutical Dosage Forms: Tablets, Marcel Dekker, NY; Lieberman, et al. (eds.), 1990, Pharmaceutical Dosage Forms: Disperse Systems, Marcel Dekker, NY; Weiner and Kotkoskie, 2000, Excipient Toxicity and Safety, Marcel Dekker, Inc., New York, N.Y.).

[0685] Selecting an administration regimen for an agent depends on several factors, including the serum or tissue turnover rate of the agent, the level of symptoms, the immunogenicity of the agent, and the accessibility of the target cells. In certain embodiments, an administration regimen maximizes the amount of agent or agents delivered to the subject consistent with an acceptable level of side effects. Accordingly, the amount of an anti-CD19 agent and B cell targeting agent delivered depends in part on the particular agents and the severity of the condition being treated. Guidance in selecting appropriate doses of antibodies and small molecules are available (see, e.g., Wawrzynczak, 1996, Antibody Therapy, Bios Scientific Pub. Ltd, Oxfordshire, UK; Kresina (ed.), 1991, Monoclonal Antibodies, Cytokines and Arthritis, Marcel Dekker, New York, N.Y.; Bach (ed.), 1993, Monoclonal Antibodies and Peptide Therapy in Autoimmune Diseases, Marcel Dekker, New York, N.Y.; Baert et al., 2003, New Engl. J. Med. 348:601-608; Milgrom et al., 1999, New Engl. J. Med. 341:1966-1973; Slamon et al., 2001, New Engl. J. Med. 344:783-792; Beniaminovitz et al., 2000, New Engl. J. Med. 342:613-619; Ghosh et al., 2003, New Engl. J. Med. 348:24-32; Lipsky et al., 2000, New Engl. J. Med. 343:1594-1602).

[0686] Determination of the appropriate dose is made by the clinician, e.g., using parameters or factors known or suspected in the art to affect treatment or predicted to affect treatment. Generally, a dose begins with an amount somewhat less than the optimum dose and it is increased by small increments thereafter until the desired or optimum effect is achieved relative to any negative side effects. Important diagnostic measures include those of symptoms of, e.g., the inflammation or level of inflammatory cytokines produced.

[0687] Actual dosage levels of an anti-CD19 agent or B cell targeting agent in a pharmaceutical composition can be varied so as to obtain an amount of the agent which in combination with another agent is effective to achieve the desired therapeutic response for a particular subject, compositions, and modes of administration, without being toxic to the subject. The selected dosage levels will depend upon a variety of pharmacokinetic factors including the activity of the particular agents, the route of administration, the time of administration, the rate of excretion of the particular agents being employed, the duration of the treatment, other agents (e.g., active agents such as therapeutic drugs or compounds and/or inert materials used as carriers) in combination with the particular anti-CD19 agents and B cell targeting agents employed, the age, sex, weight, condition, general health and prior medical history of the subject being treated, and like factors known in the medical arts.

[0688] Compositions comprising CD19 binding molecules and/or B cell targeting agents can be provided, for example, by continuous infusion, or by doses at intervals. Doses can be provided intravenously, subcutaneously, topically, orally, nasally, rectally, intramuscular, intracerebrally, or by inhalation. A specific dose protocol is one involving the maximal dose or dose frequency that avoids significant undesirable side effects.

[0689] An effective amount for a particular subject can vary depending on factors such as the condition being treated, the overall health of the subject, the method route and dose of administration and the severity of side effects (see, e.g., Maynard, et al. (1996) A Handbook of SOPs for Good Clinical Practice, Interpharm Press, Boca Raton, Fla.; Dent (2001) Good Laboratory and Good Clinical Practice, Urch Publ., London, UK).

[0690] The route of administration for a CD19 binding molecule or B cell targeting agent can be by, e.g., topical or cutaneous application, injection or infusion by intravenous, intraperitoneal, intracerebral, intramuscular, intraocular, intraarterial, intracerebrospinal, intralesional, or by sustained release systems or an implant (see, e.g., Sidman et al., 1983, Biopolymers 22:547-556; Langer et al., 1981, J. Biomed. Mater. Res. 15:167-277; Langer, 1982, Chem. Tech. 12:98-105; Epstein et al., 1985, Proc. Natl. Acad. Sci. USA 82:3688-3692; Hwang et al., 1980, Proc. Natl. Acad. Sci. USA 77:4030-4034; U.S. Pat. Nos. 6,350,466 and 6,316,024). Where necessary, the composition can also include a solubilizing agent and a local anesthetic such as lidocaine to ease pain at the site of the injection. In addition, pulmonary administration can also be employed, e.g., by use of an inhaler or nebulizer, and formulation with an aerosolizing agent. See, e.g., U.S. Pat. Nos. 6,019,968, 5,985,320, 5,985,309, 5,934,272, 5,874,064, 5,855,913, 5,290,540, and 4,880,078; and PCT Publication Nos. WO 92/19244, WO 97/32572, WO 97/44013, WO 98/31346, and WO 99/66903.

[0691] A composition of the present disclosure can also be administered via one or more routes of administration using one or more of a variety of known methods. As will be appreciated by a skilled artisan, the route and/or mode of administration will vary depending upon the desired results. Selected routes of administration for CD19 binding molecules and B cell targeting agents include intravenous, intramuscular, intradermal, intraperitoneal, subcutaneous, spinal or other general routes of administration, for example by injection or infusion. General administration can represent modes of administration other than enteral and topical administration, usually by injection, and includes, without limitation, intravenous, intramuscular, intraarterial, intrathecal, intracapsular, intraorbital, intracardiac, intradermal, intraperitoneal, transtracheal, subcutaneous, subcuticular, intraarticular, subcapsular, subarachnoid, intraspinal, epidural and intrasternal injection and infusion. Alternatively, a composition of the disclosure can be administered via a non-general route, such as a topical, epidermal or mucosal route of administration, for example, intranasally, orally, vaginally, rectally, sublingually or topically. In one embodiment, a CD19 binding molecule and/or a B cell targeting agent is administered by infusion. In another embodiment, a CD19 binding molecule and/or B cell targeting agent is administered subcutaneously.

[0692] If a CD19 binding molecule and/or a B cell targeting agent is administered in a controlled release or sustained release system, a pump can be used to achieve controlled or sustained release (see Langer, supra; Sefton, 1987, CRC Crit. Ref Biomed. Eng. 14:20; Buchwald et al., 1980, Surgery 88:507; Saudek et al., 1989, N. Engl. J. Med. 321:574). Polymeric materials can be used to achieve controlled or sustained release of the therapies of the disclosure (see, e.g., Medical Applications of Controlled Release, Langer and Wise (eds.), CRC Pres., Boca Raton, Fla. (1974); Controlled Drug Bioavailability, Drug Product Design and Performance, Smolen and Ball (eds.), Wiley, New York (1984); Ranger and Peppas, 1983, J., Macromol. Sci. Rev. Macromol. Chem. 23:61; see also Levy et al., 1985, Science 228:190; During et al., 1989, Ann. Neurol. 25:351; Howard et al., 1989, J. Neurosurg. 71:105); U.S. Pat. Nos. 5,679,377; 5,916,597; 5,912,015; 5,989,463; 5,128,326; PCT Publication No. WO 99/15154; and PCT Publication No. WO 99/20253. Examples of polymers used in sustained release formulations include, but are not limited to, poly(2-hydroxy ethyl methacrylate), poly(methyl methacrylate), poly(acrylic acid), poly(ethylene-co-vinyl acetate), poly(methacrylic acid), polyglycolides (PLG), polyanhydrides, poly(N-vinyl pyrrolidone), poly(vinyl alcohol), polyacrylamide, poly(ethylene glycol), polylactides (PLA), poly(lactide-co-glycolides) (PLGA), and polyorthoesters. In one embodiment, the polymer used in a sustained release formulation is inert, free of leachable impurities, stable on storage, sterile, and biodegradable. A controlled or sustained release system can be placed in proximity of the prophylactic or therapeutic target, thus requiring only a fraction of the systemic dose (see, e.g., Goodson, in Medical Applications of Controlled Release, supra, vol. 2, pp. 115-138 (1984)).

[0693] Controlled release systems are discussed in the review by Langer (1990, Science 249:1527-1533). Any technique known to one of skill in the art can be used to produce sustained release formulations comprising one or more CD19 binding molecules or B cell targeting agents. See, e.g., U.S. Pat. No. 4,526,938, PCT publication WO 91/05548, PCT publication WO 96/20698, Ning et al., 1996, Radiotherapy & Oncology 39:179-189, Song et al., 1995, PDA Journal of Pharmaceutical Science & Technology 50:372-397, Cleek et al., 1997, Pro. Int'l. Symp. Control. Rel. Bioact. Mater. 24:853-854, and Lam et al., 1997, Proc. Int'l. Symp. Control Rel. Bioact. Mater. 24:759-760.

[0694] If a CD19 binding molecule and/or a B cell targeting agent is administered topically, it can be formulated in the form of an ointment, cream, transdermal patch, lotion, gel, shampoo, spray, aerosol, solution, emulsion, or other form well-known to one of skill in the art. See, e.g., Remington's Pharmaceutical Sciences and Introduction to Pharmaceutical Dosage Forms, 19th ed., Mack Pub. Co., Easton, Pa. (1995). For non-sprayable topical dosage forms, viscous to semi-solid or solid forms comprising a carrier or one or more excipients compatible with topical application and having a dynamic viscosity, in some instances, greater than water are typically employed. Suitable formulations include, without limitation, solutions, suspensions, emulsions, creams, ointments, powders, liniments, salves, and the like, which are, if desired, sterilized or mixed with auxiliary agents (e.g., preservatives, stabilizers, wetting agents, buffers, or salts) for influencing various properties, such as, for example, osmotic pressure. Other suitable topical dosage forms include sprayable aerosol preparations where the active ingredient, in some instances, in combination with a solid or liquid inert carrier, is packaged in a mixture with a pressurized volatile (e.g., a gaseous propellant, such as freon) or in a squeeze bottle. Moisturizers or humectants can also be added to pharmaceutical compositions and dosage forms if desired. Examples of such additional ingredients are well-known.

[0695] If a composition comprising a CD19 binding molecule or B cell targeting agent is administered intranasally, the CD19 binding molecule or B cell targeting agent can be formulated in an aerosol form, spray, mist or in the form of drops. In particular, prophylactic or therapeutic agents for use according to the present disclosure can be conveniently delivered in the form of an aerosol spray presentation from pressurized packs or a nebulizer, with the use of a suitable propellant (e.g., dichlorodifluoromethane, trichlorofluoromethane, dichlorotetrafluoroethane, carbon dioxide or other suitable gas). In the case of a pressurized aerosol the dosage unit can be determined by providing a valve to deliver a metered amount. Capsules and cartridges (composed of, e.g., gelatin) for use in an inhaler or insufflator can be formulated containing a powder mix of the CD19 binding molecule or B cell targeting agent and a suitable powder base such as lactose or starch.

[0696] In certain embodiments, the CD19 binding molecules and B cell targeting agents can be formulated to ensure proper distribution in vivo. For example, the blood-brain barrier (BBB) excludes many highly hydrophilic compounds. To ensure that the therapeutic compounds of the disclosure cross the BBB (if desired), they can be formulated, for example, in liposomes. For methods of manufacturing liposomes, see, e.g., U.S. Pat. Nos. 4,522,811; 5,374,548; and 5,399,331. The liposomes can comprise one or more moieties which are selectively transported into specific cells or organs, thus enhance targeted drug delivery (see, e.g., Ranade, 1989, J. Clin. Pharmacol. 29:685). Exemplary targeting moieties include folate or biotin (see, e.g., U.S. Pat. No. 5,416,016 to Low et al.); mannosides (Umezawa et al., 1988, Biochem. Biophys. Res. Commun. 153:1038); antibodies (Bloeman et al., 1995, FEBS Lett. 357:140; Owais et al., 1995, Antimicrob. Agents Chemother. 39:180); surfactant protein A receptor (Briscoe et al., 1995, Am. J. Physiol. 1233:134); p 120 (Schreier et al., 1994, J. Biol. Chem. 269:9090); see also Keinanen and Laukkanen, 1994, FEBS Lett. 346:123; Killion and Fidler, 1994, Immunomethods 4:273.

[0697] An anti-CD19 agent and a B cell targeting agent combination can be administered to a subject in the same pharmaceutical composition. Alternatively, the anti-CD19 agent and the B cell targeting agent of a combination are administered to a subject in separate pharmaceutical compositions.

[0698] Administered “in combination,” as used herein, means that two (or more) different treatments are delivered to the subject during the course of the subject's affliction with the disorder, e.g., the two or more treatments are delivered after the subject has been diagnosed with the disorder and before the disorder has been cured or eliminated or treatment has ceased for other reasons. In some embodiments, the delivery of one treatment is still occurring when the delivery of the second begins, so that there is overlap in terms of administration. This is sometimes referred to herein as “simultaneous” or “concurrent delivery”. For example, each therapy can be administered to a subject at the same time or sequentially in any order at different points in time; however, if not administered at the same time, they should be administered sufficiently close in time so as to provide the desired therapeutic effect.

[0699] An anti-CD19 agent and a B cell targeting agent can be administered simultaneously, in the same or in separate compositions, or sequentially. For sequential administration, the B cell targeting agent can be administered first, and the anti-CD19 agent can be administered second, or the order of administration can be reversed.

[0700] The anti-CD19 agent and the B cell targeting agent can be administered to a subject in any appropriate form and by any suitable route. In some embodiments, the routes of administration are the same. In other embodiments the routes of administration are different.

[0701] In other embodiments, the delivery of one treatment ends before the delivery of the other treatment begins, e.g., administration of the B cell targeting agent ends before administration of the anti-CD19 agent begins.

[0702] In some embodiments, the treatment is more effective because of combined administration. For example, the anti-CD19 agent therapy is more effective, e.g., an equivalent effect is seen with less of the anti-CD19 agent, or the B cell targeting agent reduces CRS symptoms than would be experienced if the anti-CD19 agent were administered in the absence of the B cell targeting agent. In some embodiments, delivery is such that the reduction in a symptom, or other parameter related to the disorder is greater than what would be observed with one treatment delivered in the absence of the other. The effect of the two treatments can be partially additive, wholly additive, or greater than additive. The delivery can be such that an effect of the first treatment delivered is still detectable when the second is delivered.

[0703] The combinations of the disclosure comprising an anti-CD19 agent and a B cell targeting agent can further comprise one or more additional agents, for example a corticosteroid (e.g., dexamethasone or prednisone) and/or an immunomodulatory imide drug (IMiD) (e.g., lenalidomide, thalidomide, pomalidomide, or iberdomide). In some embodiments, the combination comprises dexamethasone. In some embodiments, the combination comprises lenalidomide. Additional agents are typically formulated in a separate pharmaceutical composition from the anti-CD19 agent and B cell targeting agent.

### 7.6. B Cell Malignancies and Patient Populations

[0704] The combinations of the disclosure can be used in the treatment of B cell malignancies. In one aspect, the disclosure provides a method of reducing the severity of one or more symptoms of CRS in a subject having a B cell malignancy and who is to be treated with or is being treated with an anti-CD19 agent, comprising administering a B cell targeting agent to the subject in combination with the anti-CD19 agent.

[0705] The present disclosure also provides methods for preventing, treating and/or managing a B cell malignancy associated with CD19-expressing cells (e.g., a hematologic cancer), the methods comprising administering to a subject in need a combination of the disclosure. In one aspect, the subject is a human.

[0706] In some embodiments, the B cell malignancy is a hematological cancer.

[0707] In some embodiments, the B cell malignancy is a malignant lymphoproliferative condition.

[0708] In some embodiments, the B cell malignancy is a plasma cell dyscrasia.

[0709] In some embodiments, the B cell malignancy is an acute leukemia. In some embodiments, the B cell malignancy is B cell acute lymphocytic leukemia (also known as B cell acute lymphoblastic leukaemia or B cell acute lymphoid leukemia) (ALL or B-ALL), e.g., relapsed and/or refractory B-ALL.

[0710] In some embodiments, the B cell malignancy is a non-Hodgkin's lymphoma (NHL), for example, chronic lymphocytic leukemia (CLL)/small lymphocytic lymphoma (SLL), follicular lymphoma (FL), mantle cell lymphoma (MCL), diffuse large B-cell lymphoma (DLBCL), Burkitt lymphoma, lymphoplasmacytic lymphoma (Waldenstrom macroglobulinemia), MALT lymphoma (mucosa-associated lymphoid tissue lymphoma) marginal zone lymphoma (MZL) (e.g., extranodal marginal zone lymphoma (EMZL) or nodal marginal zone B-cell lymphoma (NZML)).

[0711] In some embodiments, the B cell malignancy is a relapsed and/or refractory non-Hodgkin's lymphoma (NHL).

[0712] In some embodiments, the B cell malignancy is chronic lymphocytic leukemia (CLL)/small lymphocytic lymphoma (SLL), e.g., relapsed and/or refractory CLL/SLL.

[0713] In some embodiments, the B cell malignancy is follicular lymphoma (FL), e.g., relapsed and/or refractory FL. In some embodiments, the FL is small cell FL. In other embodiments, the FL is large cell FL.

[0714] In some embodiments, the B cell malignancy is mantle cell lymphoma (MCL), e.g., relapsed and/or refractory MCL.

[0715] In some embodiments, the B cell malignancy is diffuse large B-cell lymphoma (DLBCL), e.g., relapsed and/or refractory DLBCL.

[0716] In some embodiments, the B cell malignancy is Burkitt lymphoma.

[0717] In some embodiments, the B cell malignancy is lymphoplasmacytic lymphoma (Waldenstrom macroglobulinemia).

[0718] In some embodiments, the B cell malignancy is MALT lymphoma (mucosa-associated lymphoid tissue lymphoma).

[0719] In some embodiments, the B cell malignancy is marginal zone lymphoma (MZL).

[0720] In some embodiments, the B cell malignancy is extranodal marginal zone lymphoma (EMZL).

[0721] In some embodiments, the B cell malignancy is nodal marginal zone B-cell lymphoma (NZML).

[0722] In some embodiments, the B cell malignancy is splenic marginal zone B-cell lymphoma (SMZL).

[0723] In some embodiments, the B cell malignancy is a Hodgkin's lymphoma.

[0724] In some embodiments, the B cell malignancy is multiple myeloma.

[0725] In some embodiments, the B cell malignancy is hairy cell leukemia.

[0726] In some embodiments, the B cell malignancy is primary effusion lymphoma.

[0727] In some embodiments, the B cell malignancy is B cell prolymphocytic leukemia.

[0728] In some embodiments, the B cell malignancy is plasmablastic lymphoma.

[0729] In some embodiments, the B cell malignancy is follicle center lymphoma.

[0730] In some embodiments, the B cell malignancy is precursor B-lymphoblastic leukemia.

[0731] In some embodiments, the B cell malignancy is high-grade B-cell lymphoma.

[0732] In some embodiments, the B cell malignancy is primary mediastinal large B-cell lymphoma.

[0733] Certain aspects of the foregoing embodiments relate to subjects having an NHL and who (i) have failed at least one prior line (and optionally up to five prior lines) of standard of care therapy, e.g., an anti-CD20 therapy such as rituximab and/or (ii) is intolerant to or ineligible for one or more other approved therapies, e.g., autologous stem cell transplant (ASCT) and/or (iii) is a non-responder to a chimeric antigen receptor (CAR) T cell therapy. The NHL can be chronic lymphocytic leukemia (CLL)/small lymphocytic lymphoma (SLL), follicular lymphoma (FL), mantle cell lymphoma (MCL), diffuse large B-cell lymphoma (DLBCL), Burkitt lymphoma, lymphoplasmacytic lymphoma (Waldenstrom macroglobulinemia), MALT lymphoma (mucosa-associated lymphoid tissue lymphoma) marginal zone lymphoma (MZL) (e.g., extranodal marginal zone lymphoma (EMZL) or nodal marginal zone B-cell lymphoma (NZML)). In some embodiments, the NHL can relapsed and/or refractory, such as relapsed and/or refractory DLBCL or MCL.

[0734] Thus, in certain aspects, a subject having an NHL to whom a combination of the disclosure is administered has failed at least one prior line of standard of care therapy and optionally up to five standard of care therapies. In various embodiments, the subject has failed one, two, three, four or five standard of care therapies. Exemplary standard of care therapies for B cell malignancies include anti-CD20 therapies such as rituximab.

[0735] In further aspects, a subject having an NHL to whom a combination of the disclosure is administered is intolerant to or ineligible for one or more other approved therapies, e.g., autologous stem cell transplant (ASCT).

[0736] In yet further aspects, a subject having an NHL to whom a combination of the disclosure is administered is a non-responder to chimeric antigen receptor (CAR) T cell therapy composition (“CAR composition”), e.g., an anti-CD19 CAR composition. In certain embodiments, the CAR composition comprises CTL019. In other embodiments, the CAR composition has the USAN or INN designation tisagenlecleucel. Tisagenlecleucel is marketed as KYMRIAH®. See, e.g., KYMRIAH® prescribing information, available at www.pharma.us.novartis.com/sites/www.pharma.us.novartis.com/files/kymriah.pdf. In other embodiments, the CAR composition has the USAN or INN designation axicabtagene ciloleucel. Axicabtagene ciloleucel is marketed as YESCARTA®. See, e.g., YESCARTA® prescribing information, available at www.yescarta.com/files/yescarta-pi.pdf. In other aspects, the CAR composition has the USAN designation brexucabtagene autoleucel. Brexucabtagene autoleucel is marketed as TECARTUS™. See, e.g., TECARTUS™ prescribing information, available at www.gilead.com/-/media/files/pdfs/medicines/oncology/tecartus/tecartus-pi.pdf. In yet other embodiments, the CAR composition has the USAN or INN designation lisocabtagene maraleucel. Lisocabtagene maraleucel is marketed as BREYANZI®. See, e.g., BREYANZI® prescribing information, available at packageinserts.bms.com/pi/pi_breyanzi.pdf.

[0737] In some embodiments, when a combination of the disclosure is administered is a non-responder to chimeric antigen receptor (CAR) T cell therapy composition (“CAR composition”), the anti-CD19 agent does not comprise a chimeric antigen receptor and/or is not a CAR composition. In other embodiments, however, the anti-CD19 agent may comprise a chimeric antigen receptor and/or be a CAR composition, for example a different CAR composition from that to which the subject did not respond. Thus, the use of an anti-CD19 agent in a CAR format in a combination of the disclosure can be part of an alternative CAR therapy for the subject.

### 8. EXAMPLES

[0738] The examples below relate, in part, to the identification of novel CD19 binders, NEG218 and NEG258, that bind to human CD19 and are cross-reactive with cynomolgus (cyno) CD19, their incorporation into bispecific (BSP) and trispecific (TSP) binding molecules that engage CD3 and, in the case of the TSPs, CD2, as well as extensive characterization of the anti-tumor and immunostimulatory activities of the BSPs and TSPs.

[0739] In functional assays, the TSPs, particularly CD3hi TSP1, demonstrate enhanced tumor cell killing and T cell activation & proliferation as compared to the corresponding BSPs. While both CD3hi TSP1 and CD3med TSP1 demonstrate effective anti-tumor responses on established tumors in tumor-bearing mice, T-cell activation by CD3hi TSP1 is particularly effective at enriching T cells with a younger and more functional phenotype. Additionally, CD3hi TSP1 is particularly effective in activating CD28neg CD8-T cells, the exhausted/terminally differentiated cytotoxic T cells. Further, CD3hi TSP1-treated T cells better retain ability to kill target cells upon repeated challenges.

[0740] Altogether, this evidence presented herein indicates that the use of CD2 co-stimulation, particularly via a CD58 moiety, results in a CD19 binding molecule that can engage T cells in a manner that can achieve optimal T cell activation and prevent exhaustion, potentially resulting in a more effective and durable anti-tumor response.

[0741] The TSPs, particularly CD3hi TSP1, are optimized for a combination of factors, ranging from a novel CD19 binding domain that cross-reacts with cyno CD19, the inclusion of a CD2 binding moiety, the nature and affinity of the T-cell binding moieties (CD58 vs. an anti-CD2 antibody, the relatively “high” or “medium” affinity of the CD3 binding moiety), and the configuration of the binding moieties in the molecules (e.g., CD19 at the N-terminus), all of which individually confer advantageous properties that are expected to result in superior CD19 therapeutics.

[0742] Ianalumab is a fully human IgG1 (immunoglobulin subclass G1) monoclonal antibody (mAb) which binds with similar potency to BAFF-R expressed on human, cynomolgus monkey and mouse B cells. Examples 7-8 below show that the anti-BAFFR antibody ianalumab is capable of depleting healthy B cells in vivo in both mouse and cynomolgus monkey. It is expected that administering ianalumab to a subject suffering from a B cell malignancy prior to administering an anti-CD19 agent to the subject will reduce the number of healthy B cells in the subject exposed to the anti-CD19 agent, thereby reducing the severity of CRS experienced by the subject compared to the CRS which would be experienced by the subject in the absence of ianalumab administration.

### 8.1. Example 1: Production of Anti-CD3-Anti-CD19 IgG1 Bispecific and Trispecific Binding Molecules in Knob-into-Holes Format

### 8.1.1. Example 1A: Initial BBM and TBM Constructs

[0743] BBMs having a CD3 ABM and a CD19 ABM (shown schematically in FIG. 3A), and TBMs having a CD3 ABM, a CD19 ABM, and a CD2 ABM (shown schematically in FIG. 3B) were produced in a knob-into-hole (KIH) format. Each BBM and TBM of this Example comprises a first half antibody (shown schematically as the left half of each construct shown in FIGS. 3A-3B) and a second half antibody (shown schematically as the right half of each construct shown in FIGS. 3A-3B).

### 8.1.1.1. Materials and Methods

### 8.1.1.1.1. Plasmids Encoding BBMs and TBMs

[0744] Plasmids for all constructs were synthesized and codon optimized for expression in mammalian cells.

[0745] For each bispecific construct, three plasmids were synthesized. A first plasmid encoding an anti-CD19 heavy chain was synthesized as a fusion comprising (in the N-terminal to C-terminal direction) (i) an anti-CD19 VH domain and (ii) a constant hIgG1 domain containing T366S, L368A, and Y407V mutations for a hole to facilitate heterodimerization as well as silencing mutations. A second plasmid encoding a light chain was synthesized as a fusion comprising (in the N-terminal to C-terminal direction) (i) an anti-CD19 VL domain and (ii) a constant human kappa sequence. The proteins encoded by the first and second plasmids form the first half antibody. A third plasmid encoding the second half antibody was synthesized as a fusion comprising (in the N-terminal to C-terminal direction) (i) an anti-CD3 single chain variable fragment (having the VH and VL domains of an anti-CD3 antibody designated as CD3hi (as defined in the following paragraph)), (ii) a linker, and (iii) a constant hIgG1 domain containing a T366W mutation for a knob to facilitate heterodimerization as well as silencing mutations.

[0746] For each trispecific construct, three plasmids were synthesized. A first plasmid encoding an anti-CD19 heavy chain was synthesized as a fusion comprising (in the N-terminal to C-terminal direction) (i) an anti-CD19 VH domain fused to a constant hIgG1 CH1 domain, (ii) a linker, (iii) an anti-CD3 scFv with VH and VL domains of an anti-CD3 antibody having high, medium, or low affinity to CD3 (in relative terms), and referred to herein as CD3hi, CD3med or CD3lo (from anti-CD3 antibodies having an affinity to CD3 of 16 nM, 30 nM, or 48 nm, respectively, as measured by Biacore), (iv) a second linker, and (v) an hIgG1 Fc domain containing T366S, L368A, and Y407V mutations for a hole to facilitate heterodimerization as well as silencing mutations. It should be understood that with respect to the mentioned Biacore affinity values and relative terms in the construct names, these are used merely for identification purposes and are not intended to represent absolute affinity values. A second plasmid encoding a light chain was synthesized as a fusion comprising (in the N-terminal to C-terminal direction) (i) an anti-CD19 VL domain and (ii) a constant human kappa sequence. The proteins encoded by the first and second plasmids form the first half antibody. A third plasmid encoding the second half antibody was synthesized as a fusion comprising (in the N-terminal to C-terminal direction) (i) the IgV domain of CD58 (CD58-6) and (ii) a constant hIgG1 domain containing a T366W mutation for a knob to facilitate heterodimerization as well as silencing mutations.

[0747] Control constructs corresponding to the CD3hi TSP1 (which has a NEG258-based CD19 binding arm) and CD3hi TSP2 (which has a NEG218-based CD19 binding arm) trispecific constructs were produced in which the CD2 ABM was replaced with a Vhh against hen egg lysozyme (such control constructs having the names CD3hi TSP1L and CD3hi TSP2L, respectively).

[0748] Amino acid sequences for components of the constructs are shown in Table 20A-1 (without Fc sequences) and Table 20A-2 (with Fc sequences).

TABLE 20A-1
Amino acid sequences

| | | | SEQ |
|---|---|---|---|
| Construct | Chain | | ID |
| Name | Description | Amino Acid Sequence | NO: |
| CD3hi | First Half | QVQLVQSGAEVKKPGASVKVSCKASGYTFTTYWIQWVRQAPG | 63 |
| TSP1 | Antibody | QRLEWMGAVYPGDADTRYTQKFQGRVTLTADRSASTAYMELS | |
| | Heavy | SLRSEDTAVYYCGRDAGLEYYALDYWGQGTLVTVSSASTKGP | |
| | Chain | SVFPLAPSSKSTSGGTAALGCLVKDYFPEPVTVSWNSGALTSG | |
| | (Fc | VHTFPAVLQSSGLYSLSSVVTVPSSSLGTQTYICNVNHKPSNTK | |
| | sequence | VDKRVEPKSCGGGGSGGGGSEVQLVESGGGLVQPGGSLKLS | |
| | not shown) | CAASGFTFNTYAMNWVRQASGKGLEWVGRIRSKYNNYATYYA | |
| | | DSVKDRFTISRDDSKSTLYLQMNSLKTEDTAVYYCVRHGNFGN | |
| | | SYVSWFAYWGQGTLVTVSSGGGGSGGGGSGGGGSGGGGS | |
| | | QAVVTQEPSLTVSPGGTVTLTCRSSTGAVTTSNYANWVQQKP | |
| | | GQAPRGLIGGTNKRAPWTPARFSGSLLGDKAALTLSGAQPED | |
| | | EAEYFCALWYSNLWVFGGGTKLTVLGGGGS | |
| | First Half | EIVMTQSPATLSVSPGERATLSCRASQDVGTAVAWYQQKPGQ | 64 |
| | Antibody | APRLLIYWASTRHTGIPARFSGSGSGTEFTLTISSLQSEDFAVYF | |
| | Light Chain | CQQYANFPLYTFGQGTKLEIKRTVAAPSVFIFPPSDEQLKSGTA | |
| | | SVVCLLNNFYPREAKVQWKVDNALQSGNSQESVTEQDSKDST | |
| | | YSLSSTLTLSKADYEKHKVYACEVTHQGLSSPVTKSFNRGEC | |
| | Second Half | SQQIYGVVYGNVTFHVPSNVPLKEVLWKKQKDKVAELENSEFR | 65 |
| | Antibody | AFSSFKNRVYLDTVSGSLTIYNLTSSDEDEYEMESPNITDTMKF | |
| | (Fc | FLYVLESGGGGS | |
| | sequence | | |
| | not shown) | | |
| CD3med | First Half | QVQLVQSGAEVKKPGASVKVSCKASGYTFTTYWIQWVRQAPG | 66 |
| TSP1 | Antibody | QRLEWMGAVYPGDADTRYTQKFQGRVTLTADRSASTAYMELS | |
| | Heavy | SLRSEDTAVYYCGRDAGLEYYALDYWGQGTLVTVSSASTKGP | |
| | Chain | SVFPLAPSSKSTSGGTAALGCLVKDYFPEPVTVSWNSGALTSG | |
| | (Fc | VHTFPAVLQSSGLYSLSSWTVPSSSLGTQTYICNVNHKPSNTK | |
| | sequence | VDKRVEPKSCGGGGSGGGGSEVQLVESGGGLVQPGGSLKLS | |
| | not shown) | CAASGFTFNTYAMNWVRQASGKGLEWVGRIRSKYNNYATYYA | |
| | | DSVKDRFTISRDDSKNTAYLQMNSLKTEDTAVYYCVRHGNFGN | |
| | | SYVSWFAHWGQGTLVTVSSGGGGSGGGGSGGGGSGGGGS | |
| | | QAVVTQEPSLTVSPGGTVTLTCGSSTGAVTSSNYANWVQQKP | |
| | | GQAPRGLIGGTNKRAPWTPARFSGSLLGGKAALTLSGAQPED | |
| | | EAEYYCALWYSNLWVFGGGTKLTVLGGGGS | |
| | First Half | EIVMTQSPATLSVSPGERATLSCRASQDVGTAVAWYQQKPGQ | 64 |
| | Antibody | APRLLIYWASTRHTGIPARFSGSGSGTEFTLTISSLQSEDFAVYF | |
| | Light Chain | CQQYANFPLYTFGQGTKLEIKRTVAAPSVFIFPPSDEQLKSGTA | |
| | | SVVCLLNNFYPREAKVQWKVDNALQSGNSQESVTEQDSKDST | |
| | | YSLSSTLTLSKADYEKHKVYACEVTHQGLSSPVTKSFNRGEC | |
| | Second Half | SQQIYGVVYGNVTFHVPSNVPLKEVLWKKQKDKVAELENSEFR | 65 |
| | Antibody | AFSSFKNRVYLDTVSGSLTIYNLTSSDEDEYEMESPNITDTMKF | |
| | (Fc | FLYVLESGGGGS | |
| | sequence | | |
| | not shown) | | |
| CD3lo | First Half | QVQLVQSGAEVKKPGASVKVSCKASGYTFTTYWIQWVRQAPG | 67 |
| TSP1 | Antibody | QRLEWMGAVYPGDADTRYTQKFQGRVTLTADRSASTAYMELS | |
| | | SLRSEDTAVYYCGRDAGLEYYALDYWGQGTLVTVSSASTKGP | |
| | Heavy | SVFPLAPSSKSTSGGTAALGCLVKDYFPEPVTVSWNSGALTSG | |
| | Chain | VHTFPAVLQSSGLYSLSSVVTVPSSSLGTQTYICNVNHKPSNTK | |
| | (Fc | VDKRVEPKSCGGGGSGGGGSEVQLVESGGGLVQPGGSLKLS | |
| | sequence | CAASGFTFNTYAMNWVRQASGKGLEWVGRIRSKYNNYATYYA | |
| | not shown) | DSVKDRFTISRDDSKSTAYLQMNSLKTEDTAVYYCVRHGNFGN | |
| | | SYVSWFAYWGQGTLVTVSSGGGGSGGGGSGGGGSGGGGS | |
| | | QAVVTQEPSLTVSPGGTVTLTCRSSTGAVTTSNYANWVQQKP | |
| | | GQAPRGLIGGTNKRAPWTPARFSGSLLGDKAALTLSGAQPED | |
| | | EAEYFCALWYSNLWVFGGGTKLTVLGGGGS | |
| | First Half | EIVMTQSPATLSVSPGERATLSCRASQDVGTAVAWYQQKPGQ | 64 |
| | Antibody | APRLLIYWASTRHTGIPARFSGSGSGTEFTLTISSLQSEDFAVYF | |
| | Light Chain | CQQYANFPLYTFGQGTKLEIKRTVAAPSVFIFPPSDEQLKSGTA | |
| | | SVVCLLNNFYPREAKVQWKVDNALQSGNSQESVTEQDSKDST | |
| | | YSLSSTLTLSKADYEKHKVYACEVTHQGLSSPVTKSFNRGEC | |
| | Second Half | SQQIYGVVYGNVTFHVPSNVPLKEVLWKKQKDKVAELENSEFR | 65 |
| | Antibody | AFSSFKNRVYLDTVSGSLTIYNLTSSDEDEYEMESPNITDTMKF | |
| | (Fc | FLYVLESGGGGS | |
| | sequence | | |
| | not shown) | | |
| CD3hi | First Half | EVQLVQSGAEVKKPGESLKISCKASGYSFTNYWMNWVRQMP | 68 |
| TSP2 | Antibody | GKGLEWMGMIHPSDSEIRLNQKFQGQVTLSVDKSIGTAYMQW | |
| | Heavy | SSLKASDTAMYYCSRWYYLSSPMDYWGQGTTVTVSSASTKGP | |
| | Chain | SVFPLAPSSKSTSGGTAALGCLVKDYFPEPVTVSWNSGALTSG | |
| | (Fc | VHTFPAVLQSSGLYSLSSVVTVPSSSLGTQTYICNVNHKPSNTK | |
| | sequence | VDKRVEPKSCGGGGSGGGGSEVQLVESGGGLVQPGGSLKLS | |
| | not shown) | CAASGFTFNTYAMNWVRQASGKGLEWVGRIRSKYNNYATYYA | |
| | | DSVKDRFTISRDDSKSTLYLQMNSLKTEDTAVYYCVRHGNFGN | |
| | | SYVSWFAYWGQGTLVTVSSGGGGSGGGGSGGGGSGGGGS | |
| | | QAVVTQEPSLTVSPGGTVTLTCRSSTGAVTTSNYANWVQQKP | |
| | | GQAPRGLIGGTNKRAPWTPARFSGSLLGDKAALTLSGAQPED | |
| | | EAEYFCALWYSNLWVFGGGTKLTVLGGGGS | |
| | First Half | EIVMTQSPATLSVSPGERATLSCRASQDVGTAVAWYQQKPGQ | 69 |
| | Antibody | APRLLIYWASTRHTGIPARFSGSGSGTEFTLTISSLQSEDFAVYF | |
| | Light Chain | CQQYSSYPYTFGQGTKLEIKRTVAAPSVFIFPPSDEQLKSGTAS | |
| | | WVCLLNNFYPREAKVQWKVDNALQSGNSQESVTEQDSKDSTY | |
| | | SLSSTLTLSKADYEKHKVYACEVTHQGLSSPVTKSFNRGEC | |
| | Second Half | SQQIYGVVYGNVTFHVPSNVPLKEVLWKKQKDKVAELENSEFR | 65 |
| | Antibody | AFSSFKNRVYLDTVSGSLTIYNLTSSDEDEYEMESPNITDTMKF | |
| | (Fc | FLYVLESGGGGS | |
| | sequence | | |
| | not shown) | | |
| CD3hi | First Half | QVQLVQSGAEVKKPGASVKVSCKASGYTFTTYWIQWVRQAPG | 63 |
| TSP1L | Antibody | QRLEWMGAVYPGDADTRYTQKFQGRVTLTADRSASTAYMELS | |
| | Heavy | SLRSEDTAVYYCGRDAGLEYYALDYWGQGTLVTVSSASTKGP | |
| | Chain | SVFPLAPSSKSTSGGTAALGCLVKDYFPEPVTVSWNSGALTSG | |
| | (Fc | VHTFPAVLQSSGLYSLSSWVTVPSSSLGTQTYICNVNHKPSNTK | |
| | sequence | VDKRVEPKSCGGGGSGGGGSEVQLVESGGGLVQPGGSLKLS | |
| | not shown) | CAASGFTFNTYAMNWVRQASGKGLEWVGRIRSKYNNYATYYA | |
| | | DSVKDRFTISRDDSKSTLYLQMNSLKTEDTAVYYCVRHGNFGN | |
| | | SYVSWFAYWGQGTLVTVSSGGGGSGGGGSGGGGSGGGGS | |
| | | QAVVTQEPSLTVSPGGTVTLTCRSSTGAVTTSNYANWVQQKP | |
| | | GQAPRGLIGGTNKRAPWTPARFSGSLLGDKAALTLSGAQPED | |
| | | EAEYFCALWYSNLWVFGGGTKLTVLGGGGS | |
| | First Half | EIVMTQSPATLSVSPGERATLSCRASQDVGTAVAWYQQKPGQ | 64 |
| | Antibody | APRLLIYWASTRHTGIPARFSGSGSGTEFTLTISSLQSEDFAVYF | |
| | Light Chain | CQQYANFPLYTFGQGTKLEIKRTVAAPSVFIFPPSDEQLKSGTA | |
| | | SVVCLLNNFYPREAKVQWKVDNALQSGNSQESVTEQDSKDST | |
| | | YSLSSTLTLSKADYEKHKVYACEVTHQGLSSPVTKSFNRGEC | |
| | Second Half | DVQLQASGGGSVQAGGSLRLSCAASGYTIGPYCMGWFRQAP | 70 |
| | Antibody | GKEREGVAAINMGGGITYYADSVKGRFTISQDNAKNTVYLLMN | |
| | (Fc | SLEPEDTAIYYCAADSTIYASYYECGHGLSTGGYGYDSWGQGT | |
| | sequence | QVTVSSGGGGS | |
| | not shown) | | |
| CD3hi | First Half | EVQLVQSGAEVKKPGESLKISCKASGYSFTNYWMNWVRQMP | 68 |
| TSP2L | Antibody | GKGLEWMGMIHPSDSEIRLNQKFQGQVTLSVDKSIGTAYMQW | |
| | Heavy | SSLKASDTAMYYCSRWYYLSSPMDYWGQGTTVTVSSASTKGP | |
| | Chain | SVFPLAPSSKSTSGGTAALGCLVKDYFPEPVTVSWNSGALTSG | |
| | (Fc | VHTFPAVLQSSGLYSLSSVTVPSSSLGTQTYICNVNHKPSNTK | |
| | sequence | VDKRVEPKSCGGGGSGGGGSEVQLVESGGGLVQPGGSLKLS | |
| | not shown) | CAASGFTFNTYAMNWVRQASGKGLEWVGRIRSKYNNYATYYA | |
| | | DSVKDRFTISRDDSKSTLYLQMNSLKTEDTAVYYCVRHGNFGN | |
| | | SYVSWFAYWGQGTLVTVSSGGGGSGGGGSGGGGSGGGGS | |
| | | QAVVTQEPSLTVSPGGTVTLTCRSSTGAVTTSNYANWVQQKP | |
| | | GQAPRGLIGGTNKRAPWTPARFSGSLLGDKAALTLSGAQPED | |
| | | EAEYFCALWYSNLWVFGGGTKLTVLGGGGS | |
| | First Half | EIVMTQSPATLSVSPGERATLSCRASQDVGTAVAWYQQKPGQ | 69 |
| | Antibody | APRLLIYWASTRHTGIPARFSGSGSGTEFTLTISSLQSEDFAVYF | |
| | Light Chain | CQQYSSYPYTFGQGTKLEIKRTVAAPSVFIFPPSDEQLKSGTAS | |
| | | WVCLLNNFYPREAKVQWKVDNALQSGNSQESVTEQDSKDSTY | |
| | | SLSSTLTLSKADYEKHKVYACEVTHQGLSSPVTKSFNRGEC | |
| | Second Half | DVQLQASGGGSVQAGGSLRLSCAASGYTIGPYCMGWFRQAP | 70 |
| | Antibody | GKEREGVAAINMGGGITYYADSVKGRFTISQDNAKNTVYLLMN | |
| | (Fc | SLEPEDTAIYYCAADSTIYASYYECGHGLSTGGYGYDSWGQGT | |
| | sequence | QVTVSSGGGGS | |
| | not shown) | | |
| CD3hi | First Half | QVQLVQSGAEVKKPGASVKVSCKASGYTFTTYWIQWVRQAPG | 71 |
| BSP1-2 | Antibody | QRLEWMGAVYPGDADTRYTQKFQGRVTLTADRSASTAYMELS | |
| arm | Heavy | SLRSEDTAVYYCGRDAGLEYYALDYWGQGTLVTVSSASTKGP | |
| | Chain | SVFPLAPSSKSTSGGTAALGCLVKDYFPEPVTVSWNSGALTSG | |
| | (Fc | VHTFPAVLQSSGLYSLSSVVTVPSSSLGTQTYICNVNHKPSNTK | |
| | sequence | VDKRVEPKSC | |
| | not shown) | | |
| | First Half | EIVMTQSPATLSVSPGERATLSCRASQDVGTAVAWYQQKPGQ | 64 |
| | Antibody | APRLLIYWASTRHTGIPARFSGSGSGTEFTLTISSLQSEDFAVYF | |
| | Light Chain | CQQYANFPLYTFGQGTKLEIKRTVAAPSVFIFPPSDEQLKSGTA | |
| | | SVVCLLNNFYPREAKVQWKVDNALQSGNSQESVTEQDSKDST | |
| | | YSLSSTLTLSKADYEKHKVYACEVTHQGLSSPVTKSFNRGEC | |
| | Second Half | EVQLVESGGGLVQPGGSLKLSCAASGFTFNTYAMNWVRQAS | 72 |
| | Antibody | GKGLEWVGRIRSKYNNYATYYADSVKDRFTISRDDSKSTLYLQ | |
| | | MNSLKTEDTAVYYCVRHGNFGNSYVSWFAYWGQGTLVTVSS | |
| | | GGGGSGGGGSGGGGSGGGGSQAVVTQEPSLTVSPGGTVTLT | |
| | (Fc | CRSSTGAVTTSNYANWVQQKPGQAPRGLIGGTNKRAPWTPA | |
| | sequence | RFSGSLLGDKAALTLSGAQPEDEAEYFCALWYSNLWVFGGGT | |
| | not shown) | KLTVLGGGGS | |
| CD3hi | First Half | EVQLVQSGAEVKKPGESLKISCKASGYSFTNYWMNWVRQMP | 73 |
| BSP2-2 | Antibody | GKGLEWMGMIHPSDSEIRLNQKFQGQVTLSVDKSIGTAYMQW | |
| arm | Heavy | SSLKASDTAMYYCSRWYYLSSPMDYWGQGTTVTVSSASTKGP | |
| | Chain | SVFPLAPSSKSTSGGTAALGCLVKDYFPEPVTVSWNSGALTSG | |
| | (Fc | VHTFPAVLQSSGLYSLSSVTVPSSSLGTQTYICNVNHKPSNTK | |
| | sequence | VDKRVEPKSC | |
| | not shown) | | |
| | First Half | EIVMTQSPATLSVSPGERATLSCRASQDVGTAVAWYQQKPGQ | 69 |
| | Antibody | APRLLIYWASTRHTGIPARFSGSGSGTEFTLTISSLQSEDFAVYF | |
| | Light Chain | CQQYSSYPYTFGQGTKLEIKRTVAAPSVFIFPPSDEQLKSGTAS | |
| | | WVCLLNNFYPREAKVQWKVDNALQSGNSQESVTEQDSKDSTY | |
| | | SLSSTLTLSKADYEKHKVYACEVTHQGLSSPVTKSFNRGEC | |
| | Second Half | EVQLVESGGGLVQPGGSLKLSCAASGFTFNTYAMNWVRQAS | 72 |
| | Antibody | GKGLEWVGRIRSKYNNYATYYADSVKDRFTISRDDSKSTLYLQ | |
| | (Fc | MNSLKTEDTAVYYCVRHGNFGNSYVSWFAYWGQGTLVTVSS | |
| | sequence | GGGGSGGGGSGGGGSGGGGSQAVVTQEPSLTVSPGGTVTLT | |
| | not shown) | CRSSTGAVTTSNYANWVQQKPGQAPRGLIGGTNKRAPWTPA | |
| | | RFSGSLLGDKAALTLSGAQPEDEAEYFCALWYSNLWVFGGGT | |
| | | KLTVLGGGGS | |

[0749] Table 20A-2 below shows the full length amino acid sequences of the constructs shown in Table 20A-1, including Fc sequences.

TABLE 20A-2
Amino acid sequences

| | | | SEQ |
|---|---|---|---|
| Construct | Chain | | ID |
| Name | Description | Amino Acid Sequence | NO: |
| CD3hi | First Half | QVQLVQSGAEVKKPGASVKVSCKASGYTFTTYWIQW | 74 |
| TSP1 | Antibody | VRQAPGQRLEWMGAVYPGDADTRYTQKFQGRVTLT | |
| | Heavy Chain | ADRSASTAYMELSSLRSEDTAVYYCGRDAGLEYYAL | |
| | (includes Fc | DYWGQGTLVTVSSASTKGPSVFPLAPSSKSTSGGTA | |
| | sequence) | ALGCLVKDYFPEPVTVSWNSGALTSGVHTFPAVLQS | |
| | | SGLYSLSSVVTVPSSSLGTQTYICNVNHKPSNTKVDK | |
| | | RVEPKSCGGGGSGGGGSEVQLVESGGGLVQPGGSL | |
| | | KLSCAASGFTFNTYAMNWVRQASGKGLEWVGRIRSK | |
| | | YNNYATYYADSVKDRFTISRDDSKSTLYLQMNSLKTE | |
| | | DTAVYYCVRHGNFGNSYVSWFAYWGQGTLVTVSSG | |
| | | GGGSGGGGSGGGGSGGGGSQAVVTQEPSLTVSPG | |
| | | GTVTLTCRSSTGAVTTSNYANWVQQKPGQAPRGLIG | |
| | | GTNKRAPWTPARFSGSLLGDKAALTLSGAQPEDEAE | |
| | | YFCALWYSNLWVFGGGTKLTVLGGGGSDKTHTCPP | |
| | | CPAPELLGGPSVFLFPPKPKDTLMISRTPEVTCVVVA | |
| | | VSHEDPEVKFNWYVDGVEVHNAKTKPREEQYASTYR | |
| | | VVSVLTVLHQDWLNGKEYKCKVSNKALAAPIEKTISKA | |
| | | KGQPREPQVCTLPPSREEMTKNQVSLSCAVKGFYPS | |
| | | DIAVEWESNGQPENNYKTTPPVLDSDGSFFLVSKLTV | |
| | | DKSRWQQGNVFSCSVMHEALHNHYTQKSLSLSPGK | |
| | First Half | EIVMTQSPATLSVSPGERATLSCRASQDVGTAVAWY | 64 |
| | Antibody | QQKPGQAPRLLIYWASTRHTGIPARFSGSGSGTEFTL | |
| | Light Chain | TISSLQSEDFAVYFCQQYANFPLYTFGQGTKLEIKRTV | |
| | | AAPSVFIFPPSDEQLKSGTASVVCLLNNFYPREAKVQ | |
| | | WKVDNALQSGNSQESVTEQDSKDSTYSLSSTLTLSK | |
| | | ADYEKHKVYACEVTHQGLSSPVTKSFNRGEC | |
| | Second Half | SQQIYGVVYGNVTFHVPSNVPLKEVLWKKQKDKVAE | 75 |
| | Antibody | LENSEFRAFSSFKNRVYLDTVSGSLTIYNLTSSDEDEY | |
| | (includes Fc | EMESPNITDTMKFFLYVLESGGGGSDKTHTCPPCPA | |
| | sequence) | PELLGGPSVFLFPPKPKDTLMISRTPEVTCVVVAVSH | |
| | | EDPEVKFNWYVDGVEVHNAKTKPREEQYASTYRVVS | |
| | | VLTVLHQDWLNGKEYKCKVSNKALAAPIEKTISKAKG | |
| | | QPREPQVYTLPPCREEMTKNQVSLWCLVKGFYPSDI | |
| | | AVEWESNGQPENNYKTTPPVLDSDGSFFLYSKLTVD | |
| | | KSRWQQGNVFSCSVMHEALHNRYTQKSLSLSPGK | |
| CD3med | First Half | QVQLVQSGAEVKKPGASVKVSCKASGYTFTTYWIQW | 76 |
| TSP1 | Antibody | VRQAPGQRLEWMGAVYPGDADTRYTQKFQGRVTLT | |
| | Heavy Chain | ADRSASTAYMELSSLRSEDTAVYYCGRDAGLEYYAL | |
| | (includes Fc | DYWGQGTLVTVSSASTKGPSVFPLAPSSKSTSGGTA | |
| | sequence) | ALGCLVKDYFPEPVTVSWNSGALTSGVHTFPAVLQS | |
| | | SGLYSLSSVVTVPSSSLGTQTYICNVNHKPSNTKVDK | |
| | | RVEPKSCGGGGSGGGGSEVQLVESGGGLVQPGGSL | |
| | | KLSCAASGFTFNTYAMNWVRQASGKGLEWVGRIRSK | |
| | | YNNYATYYADSVKDRFTISRDDSKNTAYLQMNSLKTE | |
| | | DTAVYYCVRHGNFGNSYVSWFAHWGQGTLVTVSSG | |
| | | GGGSGGGGSGGGGSGGGGSQAVVTQEPSLTVSPG | |
| | | GTVTLTCGSSTGAVTSSNYANWVQQKPGQAPRGLIG | |
| | | GTNKRAPWTPARFSGSLLGGKAALTLSGAQPEDEAE | |
| | | YYCALWYSNLWVFGGGTKLTVLGGGGSDKTHTCPP | |
| | | CPAPELLGGPSVFLFPPKPKDTLMISRTPEVTCVVVA | |
| | | VSHEDPEVKFNWYVDGVEVHNAKTKPREEQYASTYR | |
| | | VVSVLTVLHQDWLNGKEYKCKVSNKALAAPIEKTISKA | |
| | | KGQPREPQVCTLPPSREEMTKNQVSLSCAVKGFYPS | |
| | | DIAVEWESNGQPENNYKTTPPVLDSDGSFFLVSKLTV | |
| | | DKSRWQQGNVFSCSVMHEALHNHYTQKSLSLSPGK | |
| | First Half | EIVMTQSPATLSVSPGERATLSCRASQDVGTAVAWY | 64 |
| | Antibody | QQKPGQAPRLLIYWASTRHTGIPARFSGSGSGTEFTL | |
| | Light Chain | TISSLQSEDFAVYFCQQYANFPLYTFGQGTKLEIKRTV | |
| | | AAPSVFIFPPSDEQLKSGTASVVCLLNNFYPREAKVQ | |
| | | WKVDNALQSGNSQESVTEQDSKDSTYSLSSTLTLSK | |
| | | ADYEKHKVYACEVTHQGLSSPVTKSFNRGEC | |
| | Second Half | SQQIYGVVYGNVTFHVPSNVPLKEVLWKKQKDKVAE | 75 |
| | Antibody | LENSEFRAFSSFKNRVYLDTVSGSLTIYNLTSSDEDEY | |
| | (includes Fc | EMESPNITDTMKFFLYVLESGGGGSDKTHTCPPCPA | |
| | sequence) | PELLGGPSVFLFPPKPKDTLMISRTPEVTCVVVAVSH | |
| | | EDPEVKFNWYVDGVEVHNAKTKPREEQYASTYRVVS | |
| | | VLTVLHQDWLNGKEYKCKVSNKALAAPIEKTISKAKG | |
| | | QPREPQVYTLPPCREEMTKNQVSLWCLVKGFYPSDI | |
| | | AVEWESNGQPENNYKTTPPVLDSDGSFFLYSKLTVD | |
| | | KSRWQQGNVFSCSVMHEALHNRYTQKSLSLSPGK | |
| CD3lo | First Half | QVQLVQSGAEVKKPGASVKVSCKASGYTFTTYWIQW | 77 |
| TSP1 | Antibody | VRQAPGQRLEWMGAVYPGDADTRYTQKFQGRVTLT | |
| | Heavy Chain | ADRSASTAYMELSSLRSEDTAVYYCGRDAGLEYYAL | |
| | (includes Fc | DYWGQGTLVTVSSASTKGPSVFPLAPSSKSTSGGTA | |
| | sequence) | ALGCLVKDYFPEPVTVSWNSGALTSGVHTFPAVLQS | |
| | | SGLYSLSSVVTVPSSSLGTQTYICNVNHKPSNTKVDK | |
| | | RVEPKSCGGGGSGGGGSEVQLVESGGGLVQPGGSL | |
| | | KLSCAASGFTFNTYAMNWVRQASGKGLEWVGRIRSK | |
| | | YNNYATYYADSVKDRFTISRDDSKSTAYLQMNSLKTE | |
| | | DTAVYYCVRHGNFGNSYVSWFAYWGQGTLVTVSSG | |
| | | GGGSGGGGSGGGGSGGGGSQAVVTQEPSLTVSPG | |
| | | GTVTLTCRSSTGAVTTSNYANWVQQKPGQAPRGLIG | |
| | | GTNKRAPWTPARFSGSLLGDKAALTLSGAQPEDEAE | |
| | | YFCALWYSNLWVFGGGTKLTVLGGGGSDKTHTCPP | |
| | | CPAPELLGGPSVFLFPPKPKDTLMISRTPEVTCVVVA | |
| | | VSHEDPEVKFNWYVDGVEVHNAKTKPREEQYASTYR | |
| | | VVSVLTVLHQDWLNGKEYKCKVSNKALAAPIEKTISKA | |
| | | KGQPREPQVCTLPPSREEMTKNQVSLSCAVKGFYPS | |
| | | DIAVEWESNGQPENNYKTTPPVLDSDGSFFLVSKLTV | |
| | | DKSRWQQGNVFSCSVMHEALHNHYTQKSLSLSPGK | |
| | First Half | EIVMTQSPATLSVSPGERATLSCRASQDVGTAVAWY | 64 |
| | Antibody | QQKPGQAPRLLIYWASTRHTGIPARFSGSGSGTEFTL | |
| | Light Chain | TISSLQSEDFAVYFCQQYANFPLYTFGQGTKLEIKRTV | |
| | | AAPSVFIFPPSDEQLKSGTASVVCLLNNFYPREAKVQ | |
| | | WKVDNALQSGNSQESVTEQDSKDSTYSLSSTLTLSK | |
| | | ADYEKHKVYACEVTHQGLSSPVTKSFNRGEC | |
| | Second Half | SQQIYGVVYGNVTFHVPSNVPLKEVLWKKQKDKVAE | 75 |
| | Antibody | LENSEFRAFSSFKNRVYLDTVSGSLTIYNLTSSDEDEY | |
| | (includes Fc | EMESPNITDTMKFFLYVLESGGGGSDKTHTCPPCPA | |
| | sequence) | PELLGGPSVFLFPPKPKDTLMISRTPEVTCVVVAVSH | |
| | | EDPEVKFNWYVDGVEVHNAKTKPREEQYASTYRVVS | |
| | | VLTVLHQDWLNGKEYKCKVSNKALAAPIEKTISKAKG | |
| | | QPREPQVYTLPPCREEMTKNQVSLWCLVKGFYPSDI | |
| | | AVEWESNGQPENNYKTTPPVLDSDGSFFLYSKLTVD | |
| | | KSRWQQGNVFSCSVMHEALHNRYTQKSLSLSPGK | |
| CD3hi | First Half | EVQLVQSGAEVKKPGESLKISCKASGYSFTNYWMNW | 78 |
| TSP2 | Antibody | VRQMPGKGLEWMGMIHPSDSEIRLNQKFQGQVTLSV | |
| | Heavy Chain | DKSIGTAYMQWSSLKASDTAMYYCSRWYYLSSPMD | |
| | (includes Fc | YWGQGTTVTVSSASTKGPSVFPLAPSSKSTSGGTAA | |
| | sequence) | LGCLVKDYFPEPVTVSWNSGALTSGVHTFPAVLQSS | |
| | | GLYSLSSVVTVPSSSLGTQTYICNVNHKPSNTKVDKR | |
| | | VEPKSCGGGGSGGGGSEVQLVESGGGLVQPGGSLK | |
| | | LSCAASGFTFNTYAMNWVRQASGKGLEWVGRIRSKY | |
| | | NNYATYYADSVKDRFTISRDDSKSTLYLQMNSLKTED | |
| | | TAVYYCVRHGNFGNSYVSWFAYWGQGTLVTVSSGG | |
| | | GGSGGGGSGGGGSGGGGSQAVVTQEPSLTVSPGG | |
| | | TVTLTCRSSTGAVTTSNYANWVQQKPGQAPRGLIGG | |
| | | TNKRAPWTPARFSGSLLGDKAALTLSGAQPEDEAEY | |
| | | FCALWYSNLWVFGGGTKLTVLGGGGSDKTHTCPPC | |
| | | PAPELLGGPSVFLFPPKPKDTLMISRTPEVTCVVVAVS | |
| | | HEDPEVKFNWYVDGVEVHNAKTKPREEQYASTYRVV | |
| | | SVLTVLHQDWLNGKEYKCKVSNKALAAPIEKTISKAK | |
| | | GQPREPQVCTLPPSREEMTKNQVSLSCAVKGFYPSD | |
| | | IAVEWESNGQPENNYKTTPPVLDSDGSFFLVSKLTVD | |
| | | KSRWQQGNVFSCSVMHEALHNHYTQKSLSLSPGK | |
| | First Half | EIVMTQSPATLSVSPGERATLSCRASQDVGTAVAWY | 69 |
| | Antibody | QQKPGQAPRLLIYWASTRHTGIPARFSGSGSGTEFTL | |
| | Light Chain | TISSLQSEDFAVYFCQQYSSYPYTFGQGTKLEIKRTVA | |
| | | APSVFIFPPSDEQLKSGTASVVCLLNNFYPREAKVQW | |
| | | KVDNALQSGNSQESVTEQDSKDSTYSLSSTLTLSKAD | |
| | | YEKHKVYACEVTHQGLSSPVTKSFNRGEC | |
| | Second Half | SQQIYGVVYGNVTFHVPSNVPLKEVLWKKQKDKVAE | 75 |
| | Antibody | LENSEFRAFSSFKNRVYLDTVSGSLTIYNLTSSDEDEY | |
| | (includes Fc | EMESPNITDTMKFFLYVLESGGGGSDKTHTCPPCPA | |
| | sequence) | PELLGGPSVFLFPPKPKDTLMISRTPEVTCVVVAVSH | |
| | | EDPEVKFNWYVDGVEVHNAKTKPREEQYASTYRVVS | |
| | | VLTVLHQDWLNGKEYKCKVSNKALAAPIEKTISKAKG | |
| | | QPREPQVYTLPPCREEMTKNQVSLWCLVKGFYPSDI | |
| | | AVEWESNGQPENNYKTTPPVLDSDGSFFLYSKLTVD | |
| | | KSRWQQGNVFSCSVMHEALHNRYTQKSLSLSPGK | |
| CD3hi | First Half | QVQLVQSGAEVKKPGASVKVSCKASGYTFTTYWIQW | 74 |
| TSP1L | Antibody | VRQAPGQRLEWMGAVYPGDADTRYTQKFQGRVTLT | |
| | Heavy Chain | ADRSASTAYMELSSLRSEDTAVYYCGRDAGLEYYAL | |
| | (includes Fc | DYWGQGTLVTVSSASTKGPSVFPLAPSSKSTSGGTA | |
| | sequence) | ALGCLVKDYFPEPVTVSWNSGALTSGVHTFPAVLQS | |
| | | SGLYSLSSVVTVPSSSLGTQTYICNVNHKPSNTKVDK | |
| | | RVEPKSCGGGGSGGGGSEVQLVESGGGLVQPGGSL | |
| | | KLSCAASGFTFNTYAMNWVRQASGKGLEWVGRIRSK | |
| | | YNNYATYYADSVKDRFTISRDDSKSTLYLQMNSLKTE | |
| | | DTAVYYCVRHGNFGNSYVSWFAYWGQGTLVTVSSG | |
| | | GGGSGGGGSGGGGSGGGGSQAVVTQEPSLTVSPG | |
| | | GTVTLTCRSSTGAVTTSNYANWVQQKPGQAPRGLIG | |
| | | GTNKRAPWTPARFSGSLLGDKAALTLSGAQPEDEAE | |
| | | YFCALWYSNLWVFGGGTKLTVLGGGGSDKTHTCPP | |
| | | CPAPELLGGPSVFLFPPKPKDTLMISRTPEVTCVVVA | |
| | | VSHEDPEVKFNWYVDGVEVHNAKTKPREEQYASTYR | |
| | | VVSVLTVLHQDWLNGKEYKCKVSNKALAAPIEKTISKA | |
| | | KGQPREPQVCTLPPSREEMTKNQVSLSCAVKGFYPS | |
| | | DIAVEWESNGQPENNYKTTPPVLDSDGSFFLVSKLTV | |
| | | DKSRWQQGNVFSCSVMHEALHNHYTQKSLSLSPGK | |
| | First Half | EIVMTQSPATLSVSPGERATLSCRASQDVGTAVAWY | 64 |
| | Antibody | QQKPGQAPRLLIYWASTRHTGIPARFSGSGSGTEFTL | |
| | Light Chain | TISSLQSEDFAVYFCQQYANFPLYTFGQGTKLEIKRTV | |
| | | AAPSVFIFPPSDEQLKSGTASVVCLLNNFYPREAKVQ | |
| | | WKVDNALQSGNSQESVTEQDSKDSTYSLSSTLTLSK | |
| | | ADYEKHKVYACEVTHQGLSSPVTKSFNRGEC | |
| | Second Half | DVQLQASGGGSVQAGGSLRLSCAASGYTIGPYCMG | 79 |
| | Antibody | WFRQAPGKEREGVAAINMGGGITYYADSVKGRFTIS | |
| | (includes Fc | QDNAKNTVYLLMNSLEPEDTAIYYCAADSTIYASYYEC | |
| | sequence) | GHGLSTGGYGYDSWGQGTQVTVSSGGGGSDKTHT | |
| | | CPPCPAPELLGGPSVFLFPPKPKDTLMISRTPEVTCV | |
| | | VVAVSHEDPEVKFNWYVDGVEVHNAKTKPREEQYAS | |
| | | TYRVVSVLTVLHQDWLNGKEYKCKVSNKALAAPIEKTI | |
| | | SKAKGQPREPQVYTLPPCREEMTKNQVSLWCLVKGF | |
| | | YPSDIAVEWESNGQPENNYKTTPPVLDSDGSFFLYSK | |
| | | LTVDKSRWQQGNVFSCSVMHEALHNRYTQKSLSLSP | |
| | | GK | |
| CD3hi | First Half | EVQLVQSGAEVKKPGESLKISCKASGYSFTNYWMNW | 78 |
| TSP2L | Antibody | VRQMPGKGLEWMGMIHPSDSEIRLNQKFQGQVTLSV | |
| | Heavy Chain | DKSIGTAYMQWSSLKASDTAMYYCSRWYYLSSPMD | |
| | (includes Fc | YWGQGTTVTVSSASTKGPSVFPLAPSSKSTSGGTAA | |
| | sequence) | LGCLVKDYFPEPVTVSWNSGALTSGVHTFPAVLQSS | |
| | | GLYSLSSVVTVPSSSLGTQTYICNVNHKPSNTKVDKR | |
| | | VEPKSCGGGGSGGGGSEVQLVESGGGLVQPGGSLK | |
| | | LSCAASGFTFNTYAMNWVRQASGKGLEWVGRIRSKY | |
| | | NNYATYYADSVKDRFTISRDDSKSTLYLQMNSLKTED | |
| | | TAVYYCVRHGNFGNSYVSWFAYWGQGTLVTVSSGG | |
| | | GGSGGGGSGGGGSGGGGSQAVVTQEPSLTVSPGG | |
| | | TVTLTCRSSTGAVTTSNYANWVQQKPGQAPRGLIGG | |
| | | TNKRAPWTPARFSGSLLGDKAALTLSGAQPEDEAEY | |
| | | FCALWYSNLWVFGGGTKLTVLGGGGSDKTHTCPPC | |
| | | PAPELLGGPSVFLFPPKPKDTLMISRTPEVTCVVVAVS | |
| | | HEDPEVKFNWYVDGVEVHNAKTKPREEQYASTYRVV | |
| | | SVLTVLHQDWLNGKEYKCKVSNKALAAPIEKTISKAK | |
| | | GQPREPQVCTLPPSREEMTKNQVSLSCAVKGFYPSD | |
| | | IAVEWESNGQPENNYKTTPPVLDSDGSFFLVSKLTVD | |
| | | KSRWQQGNVFSCSVMHEALHNHYTQKSLSLSPGK | |
| | First Half | EIVMTQSPATLSVSPGERATLSCRASQDVGTAVAWY | 69 |
| | Antibody | QQKPGQAPRLLIYWASTRHTGIPARFSGSGSGTEFTL | |
| | Light Chain | TISSLQSEDFAVYFCQQYSSYPYTFGQGTKLEIKRTVA | |
| | | APSVFIFPPSDEQLKSGTASVVCLLNNFYPREAKVQW | |
| | | KVDNALQSGNSQESVTEQDSKDSTYSLSSTLTLSKAD | |
| | | YEKHKVYACEVTHQGLSSPVTKSFNRGEC | |
| | Second Half | DVQLQASGGGSVQAGGSLRLSCAASGYTIGPYCMG | 79 |
| | Antibody | WFRQAPGKEREGVAAINMGGGITYYADSVKGRFTIS | |
| | (includes Fc | QDNAKNTVYLLMNSLEPEDTAIYYCAADSTIYASYYEC | |
| | sequence) | GHGLSTGGYGYDSWGQGTQVTVSSGGGGSDKTHT | |
| | | CPPCPAPELLGGPSVFLFPPKPKDTLMISRTPEVTCV | |
| | | VVAVSHEDPEVKFNWYVDGVEVHNAKTKPREEQYAS | |
| | | TYRVVSVLTVLHQDWLNGKEYKCKVSNKALAAPIEKTI | |
| | | SKAKGQPREPQVYTLPPCREEMTKNQVSLWCLVKGF | |
| | | YPSDIAVEWESNGQPENNYKTTPPVLDSDGSFFLYSK | |
| | | LTVDKSRWQQGNVFSCSVMHEALHNRYTQKSLSLSP | |
| | | GK | |
| CD3hi | First Half | QVQLVQSGAEVKKPGASVKVSCKASGYTFTTYWIQW | 80 |
| BSP1-2 | Antibody | VRQAPGQRLEWMGAVYPGDADTRYTQKFQGRVTLT | |
| arm | Heavy Chain | ADRSASTAYMELSSLRSEDTAVYYCGRDAGLEYYAL | |
| | (includes Fc | DYWGQGTLVTVSSASTKGPSVFPLAPSSKSTSGGTA | |
| | sequence) | ALGCLVKDYFPEPVTVSWNSGALTSGVHTFPAVLQS | |
| | | SGLYSLSSVVTVPSSSLGTQTYICNVNHKPSNTKVDK | |
| | | RVEPKSCDKTHTCPPCPAPELLGGPSVFLFPPKPKDT | |
| | | LMISRTPEVTCVVVAVSHEDPEVKFNWYVDGVEVHN | |
| | | AKTKPREEQYASTYRVVSVLTVLHQDWLNGKEYKCK | |
| | | VSNKALAAPIEKTISKAKGQPREPQVCTLPPSREEMT | |
| | | KNQVSLSCAVKGFYPSDIAVEWESNGQPENNYKTTP | |
| | | PVLDSDGSFFLVSKLTVDKSRWQQGNVFSCSVMHEA | |
| | | LHNHYTQKSLSLSPGK | |
| | First Half | EIVMTQSPATLSVSPGERATLSCRASQDVGTAVAWY | 64 |
| | Antibody | QQKPGQAPRLLIYWASTRHTGIPARFSGSGSGTEFTL | |
| | Light Chain | TISSLQSEDFAVYFCQQYANFPLYTFGQGTKLEIKRTV | |
| | | AAPSVFIFPPSDEQLKSGTASVVCLLNNFYPREAKVQ | |
| | | WKVDNALQSGNSQESVTEQDSKDSTYSLSSTLTLSK | |
| | | ADYEKHKVYACEVTHQGLSSPVTKSFNRGEC | |
| | Second Half | EVQLVESGGGLVQPGGSLKLSCAASGFTFNTYAMN | 81 |
| | Antibody | WVRQASGKGLEWVGRIRSKYNNYATYYADSVKDRFT | |
| | (includes Fc | ISRDDSKSTLYLQMNSLKTEDTAVYYCVRHGNFGNSY | |
| | sequence) | VSWFAYWGQGTLVTVSSGGGGSGGGGSGGGGSG | |
| | | GGGSQAVVTQEPSLTVSPGGTVTLTCRSSTGAVTTS | |
| | | NYANWVQQKPGQAPRGLIGGTNKRAPWTPARFSGS | |
| | | LLGDKAALTLSGAQPEDEAEYFCALWYSNLWVFGGG | |
| | | TKLTVLGGGGSDKTHTCPPCPAPELLGGPSVFLFPPK | |
| | | PKDTLMISRTPEVTCVVVAVSHEDPEVKFNWYVDGV | |
| | | EVHNAKTKPREEQYASTYRVVSVLTVLHQDWLNGKE | |
| | | YKCKVSNKALAAPIEKTISKAKGQPREPQVYTLPPCR | |
| | | EEMTKNQVSLWCLVKGFYPSDIAVEWESNGQPENNY | |
| | | KTTPPVLDSDGSFFLYSKLTVDKSRWQQGNVFSCSV | |
| | | MHEALHNRYTQKSLSLSPGK | |
| CD3hi | First Half | EVQLVQSGAEVKKPGESLKISCKASGYSFTNYWMNW | 82 |
| BSP2-2 | Antibody | VRQMPGKGLEWMGMIHPSDSEIRLNQKFQGQVTLSV | |
| arm | Heavy Chain | DKSIGTAYMQWSSLKASDTAMYYCSRWYYLSSPMD | |
| | (includes Fc | YWGQGTTVTVSSASTKGPSVFPLAPSSKSTSGGTAA | |
| | sequence) | LGCLVKDYFPEPVTVSWNSGALTSGVHTFPAVLQSS | |
| | | GLYSLSSVVTVPSSSLGTQTYICNVNHKPSNTKVDKR | |
| | | VEPKSCDKTHTCPPCPAPELLGGPSVFLFPPKPKDTL | |
| | | MISRTPEVTCVVVAVSHEDPEVKFNWYVDGVEVHNA | |
| | | KTKPREEQYASTYRVVSVLTVLHQDWLNGKEYKCKV | |
| | | SNKALAAPIEKTISKAKGQPREPQVCTLPPSREEMTK | |
| | | NQVSLSCAVKGFYPSDIAVEWESNGQPENNYKTTPP | |
| | | VLDSDGSFFLVSKLTVDKSRWQQGNVFSCSVMHEAL | |
| | | HNHYTQKSLSLSPGK | |
| | First Half | EIVMTQSPATLSVSPGERATLSCRASQDVGTAVAWY | 69 |
| | Antibody | QQKPGQAPRLLIYWASTRHTGIPARFSGSGSGTEFTL | |
| | Light Chain | TISSLQSEDFAVYFCQQYSSYPYTFGQGTKLEIKRTVA | |
| | | APSVFIFPPSDEQLKSGTASVVCLLNNFYPREAKVQW | |
| | | KVDNALQSGNSQESVTEQDSKDSTYSLSSTLTLSKAD | |
| | | YEKHKVYACEVTHQGLSSPVTKSFNRGEC | |
| | Second Half | EVQLVESGGGLVQPGGSLKLSCAASGFTFNTYAMN | 81 |
| | Antibody | WVRQASGKGLEWVGRIRSKYNNYATYYADSVKDRFT | |
| | (includes Fc | ISRDDSKSTLYLQMNSLKTEDTAVYYCVRHGNFGNSY | |
| | sequence) | VSWFAYWGQGTLVTVSSGGGGSGGGGSGGGGSG | |
| | | GGGSQAVVTQEPSLTVSPGGTVTLTCRSSTGAVTTS | |
| | | NYANWVQQKPGQAPRGLIGGTNKRAPWTPARFSGS | |
| | | LLGDKAALTLSGAQPEDEAEYFCALWYSNLWVFGGG | |
| | | TKLTVLGGGGSDKTHTCPPCPAPELLGGPSVFLFPPK | |
| | | PKDTLMISRTPEVTCVVVAVSHEDPEVKFNWYVDGV | |
| | | EVHNAKTKPREEQYASTYRVVSVLTVLHQDWLNGKE | |
| | | YKCKVSNKALAAPIEKTISKAKGQPREPQVYTLPPCR | |
| | | EEMTKNQVSLWCLVKGFYPSDIAVEWESNGQPENNY | |
| | | KTTPPVLDSDGSFFLYSKLTVDKSRWQQGNVFSCSV | |
| | | MHEALHNRYTQKSLSLSPGK | |

### 8.1.1.1.2. Expression and Purification

[0750] BBMs and TBMs were expressed transiently by co-transfection of the respective chains in HEK293 cells. Briefly, transfection of the cells with the heavy and light chain plasmids was performed using PEI as transfection reagent with a final DNA:PEI ratio of 1:3. 1 mg of plasmid per liter of culture was used for transfection of cultures having 2.0 million cells/mL of serum media. After 5 days of expression, BBMs and TBMs were harvested by clarification of the media via centrifugation and filtration. Purification was performed via anti-OH 1 affinity batch binding (CaptureSelect IgG-CH1 Affinity Matrix, Thermo-Fisher Scientific, Waltham, MA, USA) or Protein A (rProteinA Sepharose, Fast flow, GE Healthcare, Uppsala, Sweden) batch binding using 1 ml resin/100 mL supernatant. The protein was allowed to bind for a minimum of 2 hours with gentle mixing, and the supernatant loaded onto a gravity filtration column. The resin was washed with 20-50 CV of PBS. BBMs and TBMs were eluted with 20 CV of 50 mM citrate, 90 mM NaCl pH 3.2. 50 mM sucrose. The eluted BBM and TBM fractions were adjusted to pH 5.5 with 1 M sodium citrate 50 mM sucrose. Preparative size exclusion chromatography was performed using Hi Load 16/60 Superdex 200 grade column (GE Healthcare Life Sciences, Uppsala, Sweden) as a final polishing step when aggregates were present. To confirm that the identity of the proteins of the BBMs and TBMs expressed matched the predicted masses for the primary amino acid sequences, proteins were analyzed by high-performance liquid chromatography coupled to mass spectrometry.

### 8.1.1.1.3. CD3 Affinity Measurements

[0751] The affinity of the CD3hi, CD3med, and CD3lo mAbs to CD3 were determined at 25° C. using a Biacore T200 system. Briefly, anti-hFc IgG1 was immobilized on a CM5 chip. After capturing CD3-Fc (1 μg/ml in HBS-EP+ buffer, flow rate of 50 μl/min, with a 30 second injection time) kinetic data was acquired by subsequent injections of 1:2 dilution series of the different antibodies in HBS-EP+ buffer.

[0752] Data were evaluated using the Biacore T200 evaluation software version 1.0. The raw data were double referenced, i.e. the response of the measuring flow cell was corrected for the response of the reference flow cell, and in a second step the response of a blank injection was subtracted. Finally, the sensorgrams were fitted by applying 1:1 binding model to calculate kinetic rate constants and dissociation equilibrium constants. Rₘₐₓ was set at local. Data were processed individually for each run.

### 8.1.2. Example 1B: Additional BBM and TBM Constructs

[0753] A one-arm BBM having a CD3 ABM and a CD19 ABM (CD3hi BSP1, shown schematically in FIG. 3C) and a TBM corresponding to CD3hi TSP1 but with a lysozyme binding arm in place of the CD19 binding arm (CD3hi TSP1C) were produced. The amino acid sequences of the CD3hi BSP1 and CD3hi TSP1C constructs are shown in Table 20B.

TABLE 20B
Amino acid sequences

| | Chain | | SEQ |
|---|---|---|---|
| Construct | Descrip- | | ID |
| Name | tion | Amino Acid Sequence | NO: |
| CD3hi | First | [sequence omitted] | 74 |
| BSP1 | Half | GYTFTTYWIQWVRQAPGQRLEWMGA | |
| | Anti- | VYPGDADTRYTQKFQGRVTLTADRS | |
| | body | ASTAYMELSSLRSEDTAVYYCGRDA | |
| | Heavy | GLEYYALDYWGQGTLVTVSSASTKG | |
| | Chain | PSVFPLAPSSKSTSGGTAALGCLVK | |
| | (in- | DYFPEPVTVSWNSGALTSGVHTFPA | |
| | cludes | VLQSSGLYSLSSVVTVPSSSLGTQT | |
| | Fc se- | YICNVNHKPSNTKVDKRVEPKSCGG | |
| | quence) | GGSGGGGSEVQLVESGGGLVQPGGS | |
| | | LKLSCAASGFTFNTYAMNWVRQASG | |
| | | KGLEWVGRIRSKYNNYATYYADSVK | |
| | | DRFTISRDDSKSTLYLQMNSLKTED | |
| | | TAVYYCVRHGNFGNSYVSWFAYWGQ | |
| | | GTLVTVSSGGGGSGGGGSGGGGSGG | |
| | | GGSQAVVTQEPSLTVSPGGTVTLTC | |
| | | RSSTGAVTTSNYANWVQQKPGQAPR | |
| | | GLIGGTNKRAPWTPARFSGSLLGDK | |
| | | AALTLSGAQPEDEAEYFCALWYSNL | |
| | | WVFGGGTKLTVLGGGGSDKTHTCPP | |
| | | CPAPELLGGPSVFLFPPKPKDTLMI | |
| | | SRTPEVTCVVVAVSHEDPEVKFNWY | |
| | | VDGVEVHNAKTKPREEQYASTYRVV | |
| | | SVLTVLHQDWLNGKEYKCKVSNKAL | |
| | | AAPIEKTISKAKGQPREPQVCTLPP | |
| | | SREEMTKNQVSLSCAVKGFYPSDIA | |
| | | VEWESNGQPENNYKTTPPVLDSDGS | |
| | | FFLVSKLTVDKSRWQQGNVFSCSVM | |
| | | HEALHNHYTQKSLSLSPGK | |
| | First | EIVMTQSPATLSVSPGERATLSCRA | 64 |
| | Half | SQDVGTAVAWYQQKPGQAPRLLIYW | |
| | Anti- | ASTRHTGIPARFSGSGSGTEFTLTI | |
| | body | SSLQSEDFAVYFCQQYANFPLYTFG | |
| | Light | QGTKLEIKRTVAAPSVFIFPPSDEQ | |
| | Chain | LKSGTASVVCLLNNFYPREAKVQWK | |
| | | VDNALQSGNSQESVTEQDSKDSTYS | |
| | | LSSTLTLSKADYEKHKVYACEVTHQ | |
| | | GLSSPVTKSFNRGEC | |
| | Second | DKTHTCPPCPAPELLGGPSVFLFPP | 83 |
| | Half | KPKDTLMISRTPEVTCVVVAVSHED | |
| | Anti- | PEVKFNWYVDGVEVHNAKTKPREEQ | |
| | body | YASTYRVVSVLTVLHQDWLNGKEYK | |
| | (in- | CKVSNKALAAPIEKTISKAKGQPRE | |
| | cludes | PQVYTLPPCREEMTKNQVSLWCLVK | |
| | Fc se- | GFYPSDIAVEWESNGQPENNYKTTP | |
| | quence) | PVLDSDGSFFLYSKLTVDKSRWQQG | |
| | | NVFSCSVMHEALHNRYTQKSLSLSP | |
| | | GK | |
| CD3hi | First | QVQLQQSGPGLVKPSQTLSLTCAIS | 84 |
| TSP1C | Half | GDSVSSNSAAWSWIRQSPGRGLEWL | |
| | Anti- | GRIYYRSKWYNDYAVSVKSRITINP | |
| | body | DTSKNQFSLQLNSVTPEDTAVYYCA | |
| | Heavy | RLDHRYHEDTVYPGMDVWGQGTLVT | |
| | Chain | VSSASTKGPSVFPLAPSSKSTSGGT | |
| | (in- | AALGCLVKDYFPEPVTVSWNSGALT | |
| | cludes | SGVHTFPAVLQSSGLYSLSSVVTVP | |
| | Fc se- | SSSLGTQTYICNVNHKPSNTKVDKR | |
| | quence) | VEPKSCGGGGSGGGGSEVQLVESGG | |
| | | GLVQPGGSLKLSCAASGFTFNTYAM | |
| | | NWVRQASGKGLEWVGRIRSKYNNYA | |
| | | TYYADSVKDRFTISRDDSKSTLYLQ | |
| | | MNSLKTEDTAVYYCVRHGNFGNSYV | |
| | | SWFAYWGQGTLVTVSSGGGGSGGGG | |
| | | SGGGGSGGGGSQAVVTQEPSLTVSP | |
| | | GGTVTLTCRSSTGAVTTSNYANWVQ | |
| | | QKPGQAPRGLIGGTNKRAPWTPARF | |
| | | SGSLLGDKAALTLSGAQPEDEAEYF | |
| | | CALWYSNLWVFGGGTKLTVLGGGGS | |
| | | DKTHTCPPCPAPELLGGPSVFLFPP | |
| | | KPKDTLMISRTPEVTCVVVAVSHED | |
| | | PEVKFNWYVDGVEVHNAKTKPREEQ | |
| | | YASTYRVVSVLTVLHQDWLNGKEYK | |
| | | CKVSNKALAAPIEKTISKAKGQPRE | |
| | | PQVCTLPPSREEMTKNQVSLSCAVK | |
| | | GFYPSDIAVEWESNGQPENNYKTTP | |
| | | PVLDSDGSFFLVSKLTVDKSRWQQG | |
| | | NVFSCSVMHEALHNHYTQKSLSLSP | |
| | | GK | |
| | First | DIELTQPPSVSVAPGQTARISCSGD | 85 |
| | Half | NLPAYTVTWYQQKPGQAPVLVIYDD | |
| | Anti- | SDRPSGIPERFSGSNSGNTATLTIS | |
| | body | GTQAEDEADYYCASWDPSSGVVFGG | |
| | Light | GTKLTVLGQPKAAPSVTLFPPSSEE | |
| | Chain | LQANKATLVCLISDFYPGAVTVAWK | |
| | | ADSSPVKAGVETTTPSKQSNNKYAA | |
| | | SSYLSLTPEQWKSHRSYSCQVTHEG | |
| | | STVEKTVAPTECS | |
| | Second | SQQIYGVVYGNVTFHVPSNVPLKEV | 75 |
| | Half | LWKKQKDKVAELENSEFRAFSSFKN | |
| | Anti- | RVYLDTVSGSLTIYNLTSSDEDEYE | |
| | body | MESPNITDTMKFFLYVLESGGGGSD | |
| | (in- | KTHTCPPCPAPELLGGPSVFLFPPK | |
| | cludes | PKDTLMISRTPEVTCVVVAVSHEDP | |
| | Fc se- | EVKFNWYVDGVEVHNAKTKPREEQY | |
| | quence) | ASTYRVVSVLTVLHQDWLNGKEYKC | |
| | | KVSNKALAAPIEKTISKAKGQPREP | |
| | | QVYTLPPCREEMTKNQVSLWCLVKG | |
| | | FYPSDIAVEWESNGQPENNYKTTPP | |
| | | VLDSDGSFFLYSKLTVDKSRWQQGN | |
| | | VFSCSVMHEALHNRYTQKSLSLSPG | |
| | | K | |

[0754] Additionally, CD3hi TSP1, CD3med T P1, D3hi B P1, and D3hi T P1 constructs were each produced in a second version having a second half antibody sequence varying from the second half antibody sequence for the construct set forth in Table 20A-2 (in the case of CD3med TSP1 and CD3hi TSP1) or Table 20B (in the case of CD3hi BSP1 and CD3hi TSP1C) by one amino acid in the Fc sequence. Specifically, the second half antibody sequences in Table 20A-2 and Table 20B have an arginine residue where the second versions have a histidine residue. The arginine residue was included in the constructs to facilitate purification via Protein A binding. The versions of the constructs set forth in Table 20A-2 and Table 20B are referred to herein as “R variants” and the versions of the constructs set forth in Table 200, below, are referred to herein as “H variants.” It is believed that the functional activity of a construct's R variant does not differ significantly from the functional activity of its H variant. Nucleotide sequences encoding H variants of CD3hi TSP1, CD3med TSP1, CD3hi SP, and CD3hi TSP1C are shown in Table 20D.

TABLE 20C
Amino acid sequences (H variants)

| | | | SEQ |
|---|---|---|---|
| Construct | Chain | | ID |
| Name | Description | Amino Acid Sequence | NO: |
| CD3hi | First Half | QVQLVQSGAEVKKPGASVKVSCKASGYTFTTYWIQWVRQ | 74 |
| TSP1 | Antibody | APGQRLEWMGAVYPGDADTRYTQKFQGRVTLTADRSAST | |
| (H variant) | Heavy Chain | AYMELSSLRSEDTAVYYCGRDAGLEYYALDYWGQGTLVT | |
| | (includes Fc | VSSASTKGPSVFPLAPSSKSTSGGTAALGCLVKDYFPEPVT | |
| | sequence) | VSWNSGALTSGVHTFPAVLQSSGLYSLSSVVTVPSSSLGT | |
| | | QTYICNVNHKPSNTKVDKRVEPKSCGGGGSGGGGSEVQL | |
| | | VESGGGLVQPGGSLKLSCAASGFTFNTYAMNWRQASGK | |
| | | GLEWVGRIRSKYNNYATYYADSVKDRFTISRDDSKSTLYLQ | |
| | | MNSLKTEDTAVYYCVRHGNFGNSYVSWFAYWGQGTLVTV | |
| | | SSGGGGSGGGGSGGGGSGGGGSQAVVTQEPSLTVSPG | |
| | | GTVTLTCRSSTGAVTTSNYANWVQQKPGQAPRGLIGGTN | |
| | | KRAPWTPARFSGSLLGDKAALTLSGAQPEDEAEYFCALWY | |
| | | SNLWVFGGGTKLTVLGGGGSDKTHTCPPCPAPELLGGPS | |
| | | VFLFPPKPKDTLMISRTPEVTCVVVAVSHEDPEVKFNWYVD | |
| | | GVEVHNAKTKPREEQYASTYRVVSVLTVLHQDWLNGKEY | |
| | | KCKVSNKALAAPIEKTISKAKGQPREPQVCTLPPSREEMTK | |
| | | NQVSLSCAVKGFYPSDIAVEWESNGQPENNYKTTPPVLDS | |
| | | DGSFFLVSKLTVDKSRWQQGNVFSCSVMHEALHNHYTQK | |
| | | SLSLSPGK | |
| | First Half | EIVMTQSPATLSVSPGERATLSCRASQDVGTAVAWYQQKP | 64 |
| | Antibody | GQAPRLLIYWASTRHTGIPARFSGSGSGTEFTLTISSLQSE | |
| | Light Chain | DFAVYFCQQYANFPLYTFGQGTKLEIKRTVAAPSVFIFPPS | |
| | | DEQLKSGTASVVCLLNNFYPREAKVQWKVDNALQSGNSQ | |
| | | ESVTEQDSKDSTYSLSSTLTLSKADYEKHKVYACEVTHQG | |
| | | LSSPVTKSFNRGEC | |
| | Second Half | SQQIYGVVYGNVTFHVPSNVPLKEVLWKKQKDKVAELENS | 86 |
| | Antibody | EFRAFSSFKNRVYLDTVSGSLTIYNLTSSDEDEYEMESPNIT | |
| | (includes Fc | DTMKFFLYVLESGGGGSDKTHTCPPCPAPELLGGPSVFLF | |
| | sequence) | PPKPKDTLMISRTPEVTCVVVAVSHEDPEVKFNWYVDGVE | |
| | | VHNAKTKPREEQYASTYRVVSVLTVLHQDWLNGKEYKCKV | |
| | | SNKALAAPIEKTISKAKGQPREPQVYTLPPCREEMTKNQVS | |
| | | LWCLVKGFYPSDIAVEWESNGQPENNYKTTPPVLDSDGSF | |
| | | FLYSKLTVDKSRWQQGNVFSCSVMHEALHNHYTQKSLSLS | |
| | | PGK | |
| CD3med | First Half | QVQLVQSGAEVKKPGASVKVSCKASGYTFTTYWIQWVRQ | 76 |
| TSP1 | Antibody | APGQRLEWMGAVYPGDADTRYTQKFQGRVTLTADRSAST | |
| (H variant) | Heavy Chain | AYMELSSLRSEDTAVYYCGRDAGLEYYALDYWGQGTLVT | |
| | (includes Fc | VSSASTKGPSVFPLAPSSKSTSGGTAALGCLVKDYFPEPVT | |
| | sequence) | VSWNSGALTSGVHTFPAVLQSSGLYSLSSVVTVPSSSLGT | |
| | | QTYICNVNHKPSNTKVDKRVEPKSCGGGGSGGGGSEVQL | |
| | | VESGGGLVQPGGSLKLSCAASGFTFNTYAMNWVRQASGK | |
| | | GLEWVGRIRSKYNNYATYYADSVKDRFTISRDDSKNTAYL | |
| | | QMNSLKTEDTAVYYCVRHGNFGNSYVSWFAHWGQGTLV | |
| | | TVSSGGGGSGGGGSGGGGSGGGGSQAVVTQEPSLTVSP | |
| | | GGTVTLTCGSSTGAVTSSNYANWVQQKPGQAPRGLIGGT | |
| | | NKRAPWTPARFSGSLLGGKAALTLSGAQPEDEAEYYCAL | |
| | | WYSNLWVFGGGTKLTVLGGGGSDKTHTCPPCPAPELLGG | |
| | | PSVFLFPPKPKDTLMISRTPEVTCVVVAVSHEDPEVKFNWY | |
| | | VDGVEVHNAKTKPREEQYASTYRVVSVLTVLHQDWLNGK | |
| | | EYKCKVSNKALAAPIEKTISKAKGQPREPQVCTLPPSREEM | |
| | | TKNQVSLSCAVKGFYPSDIAVEWESNGQPENNYKTTPPVL | |
| | | DSDGSFFLVSKLTVDKSRWQQGNVFSCSVMHEALHNHYT | |
| | | QKSLSLSPGK | |
| | First Half | EIVMTQSPATLSVSPGERATLSCRASQDVGTAVAWYQQKP | 64 |
| | Antibody | GQAPRLLIYWASTRHTGIPARFSGSGSGTEFTLTISSLQSE | |
| | Light Chain | DFAVYFCQQYANFPLYTFGQGTKLEIKRTVAAPSVFIFPPS | |
| | | DEQLKSGTASVVCLLNNFYPREAKVQWKVDNALQSGNSQ | |
| | | ESVTEQDSKDSTYSLSSTLTLSKADYEKHKVYACEVTHQG | |
| | | LSSPVTKSFNRGEC | |
| | Second Half | SQQIYGVVYGNVTFHVPSNVPLKEVLWKKQKDKVAELENS | 86 |
| | Antibody | EFRAFSSFKNRVYLDTVSGSLTIYNLTSSDEDEYEMESPNIT | |
| | (includes Fc | DTMKFFLYVLESGGGGSDKTHTCPPCPAPELLGGPSVFLF | |
| | sequence) | PPKPKDTLMISRTPEVTCVVVAVSHEDPEVKFNWYVDGVE | |
| | | VHNAKTKPREEQYASTYRVVSVLTVLHQDWLNGKEYKCKV | |
| | | SNKALAAPIEKTISKAKGQPREPQVYTLPPCREEMTKNQVS | |
| | | LWCLVKGFYPSDIAVEWESNGQPENNYKTTPPVLDSDGSF | |
| | | FLYSKLTVDKSRWQQGNVFSCSVMHEALHNHYTQKSLSLS | |
| | | PGK | |
| CD3hi | First Half | QVQLVQSGAEVKKPGASVKVSCKASGYTFTTYWIQWVRQ | 74 |
| BSP1 | Antibody | APGQRLEWMGAVYPGDADTRYTQKFQGRVTLTADRSAST | |
| (H variant) | Heavy Chain | AYMELSSLRSEDTAVYYCGRDAGLEYYALDYWGQGTLVT | |
| | (includes Fc | VSSASTKGPSVFPLAPSSKSTSGGTAALGCLVKDYFPEPVT | |
| | sequence) | VSWNSGALTSGVHTFPAVLQSSGLYSLSSVVTVPSSSLGT | |
| | | QTYICNVNHKPSNTKVDKRVEPKSCGGGGSGGGGSEVQL | |
| | | VESGGGLVQPGGSLKLSCAASGFTFNTYAMNWVRQASGK | |
| | | GLEWVGRIRSKYNNYATYYADSVKDRFTISRDDSKSTLYLQ | |
| | | MNSLKTEDTAVYYCVRHGNFGNSYVSWFAYWGQGTLVTV | |
| | | SSGGGGSGGGGSGGGGSGGGGSQAVVTQEPSLTVSPG | |
| | | GTVTLTCRSSTGAVTTSNYANWVQQKPGQAPRGLIGGTN | |
| | | KRAPWTPARFSGSLLGDKAALTLSGAQPEDEAEYFCALWY | |
| | | SNLWVFGGGTKLTVLGGGGSDKTHTCPPCPAPELLGGPS | |
| | | VFLFPPKPKDTLMISRTPEVTCVVVAVSHEDPEVKFNWYVD | |
| | | GVEVHNAKTKPREEQYASTYRVVSVLTVLHQDWLNGKEY | |
| | | KCKVSNKALAAPIEKTISKAKGQPREPQVCTLPPSREEMTK | |
| | | NQVSLSCAVKGFYPSDIAVEWESNGQPENNYKTTPPVLDS | |
| | | DGSFFLVSKLTVDKSRWQQGNVFSCSVMHEALHNHYTQK | |
| | | SLSLSPGK | |
| | First Half | EIVMTQSPATLSVSPGERATLSCRASQDVGTAVAWYQQKP | 64 |
| | Antibody | GQAPRLLIYWASTRHTGIPARFSGSGSGTEFTLTISSLQSE | |
| | Light Chain | DFAVYFCQQYANFPLYTFGQGTKLEIKRTVAAPSVFIFPPS | |
| | | DEQLKSGTASVVCLLNNFYPREAKVQWKVDNALQSGNSQ | |
| | | ESVTEQDSKDSTYSLSSTLTLSKADYEKHKVYACEVTHQG | |
| | | LSSPVTKSFNRGEC | |
| | Second Half | DKTHTCPPCPAPELLGGPSVFLFPPKPKDTLMISRTPEVTC | 87 |
| | Antibody | VVVAVSHEDPEVKFNWYVDGVEVHNAKTKPREEQYASTY | |
| | (includes Fc | RVVSVLTVLHQDWLNGKEYKCKVSNKALAAPIEKTISKAKG | |
| | sequence) | QPREPQVYTLPPCREEMTKNQVSLWCLVKGFYPSDIAVE | |
| | | WESNGQPENNYKTTPPVLDSDGSFFLYSKLTVDKSRWQQ | |
| | | GNVFSCSVMHEALHNHYTQKSLSLSPGK | |
| CD3hi | First Half | QVQLQQSGPGLVKPSQTLSLTCAISGDSVSSNSAAWSWIR | 84 |
| TSP1C | Antibody | QSPGRGLEWLGRIYYRSKWYNDYAVSVKSRITINPDTSKN | |
| (H variant) | Heavy Chain | QFSLQLNSVTPEDTAVYYCARLDHRYHEDTVYPGMDVWG | |
| | (includes Fc | QGTLVTVSSASTKGPSVFPLAPSSKSTSGGTAALGCLVKD | |
| | sequence) | YFPEPVTVSWNSGALTSGVHTFPAVLQSSGLYSLSSVVTV | |
| | | PSSSLGTQTYICNVNHKPSNTKVDKRVEPKSCGGGGSGG | |
| | | GGSEVQLVESGGGLVQPGGSLKLSCAASGFTFNTYAMNW | |
| | | VRQASGKGLEWVGRIRSKYNNYATYYADSVKDRFTISRDD | |
| | | SKSTLYLQMNSLKTEDTAVYYCVRHGNFGNSYVSWFAYW | |
| | | GQGTLVTVSSGGGGSGGGGSGGGGSGGGGSQAVVTQE | |
| | | PSLTVSPGGTVTLTCRSSTGAVTTSNYANWVQQKPGQAP | |
| | | RGLIGGTNKRAPWTPARFSGSLLGDKAALTLSGAQPEDEA | |
| | | EYFCALWYSNLWVFGGGTKLTVLGGGGSDKTHTCPPCPA | |
| | | PELLGGPSVFLFPPKPKDTLMISRTPEVTCVVVAVSHEDPE | |
| | | VKFNWYVDGVEVHNAKTKPREEQYASTYRVVSVLTVLHQ | |
| | | DWLNGKEYKCKVSNKALAAPIEKTISKAKGQPREPQVCTLP | |
| | | PSREEMTKNQVSLSCAVKGFYPSDIAVEWESNGQPENNY | |
| | | KTTPPVLDSDGSFFLVSKLTVDKSRWQQGNVFSCSVMHE | |
| | | ALHNHYTQKSLSLSPGK | |
| | First Half | DIELTQPPSVSVAPGQTARISCSGDNLPAYTVTWYQQKPG | 85 |
| | Antibody | QAPVLVIYDDSDRPSGIPERFSGSNSGNTATLTISGTQAED | |
| | Light Chain | EADYYCASWDPSSGVVFGGGTKLTVLGQPKAAPSVTLFPP | |
| | | SSEELQANKATLVCLISDFYPGAVTVAWKADSSPVKAGVET | |
| | | TTPSKQSNNKYAASSYLSLTPEQWKSHRSYSCQVTHEGST | |
| | | VEKTVAPTECS | |
| | Second Half | SQQIYGVVYGNVTFHVPSNVPLKEVLWKKQKDKVAELENS | 86 |
| | Antibody | EFRAFSSFKNRVYLDTVSGSLTIYNLTSSDEDEYEMESPNIT | |
| | (includes Fc | DTMKFFLYVLESGGGGSDKTHTCPPCPAPELLGGPSVFLF | |
| | sequence) | PPKPKDTLMISRTPEVTCVVVAVSHEDPEVKFNWYVDGVE | |
| | | VHNAKTKPREEQYASTYRVVSVLTVLHQDWLNGKEYKCKV | |
| | | SNKALAAPIEKTISKAKGQPREPQVYTLPPCREEMTKNQVS | |
| | | LWCLVKGFYPSDIAVEWESNGQPENNYKTTPPVLDSDGSF | |
| | | FLYSKLTVDKSRWQQGNVFSCSVMHEALHNHYTQKSLSLS | |
| | | PGK | |

TABLE 20D
Nucleotide sequences (H variants)

| | | | SEQ |
|---|---|---|---|
| Construct | Chain | | ID |
| Name | Description | Nucleic Acid Sequence | NO: |
| CD3hi | First Half | ATGCCACTGCTGCTTCTACTGCCACTCCTGTGGGCAGGA | 88 |
| TSP1 | Antibody | GCACTGGCCCAAGTGCAACTGGTGCAGTCCGGTGCCGA | |
| (H variant) | Heavy Chain | AGTGAAGAAGCCCGGTGCCTCTGTGAAGGTGTCCTGCAA | |
| | (includes | GGCGTCGGGATACACGTTCACCACTTACTGGATTCAGTG | |
| | signal | GGTCAGACAGGCCCCGGGACAGAGACTGGAGTGGATGG | |
| | peptide | GAGCCGTGTACCCCGGAGATGCAGACACTCGCTACACCC | |
| | sequence) | AGAAGTTCCAGGGCCGCGTGACTTTGACCGCCGACAGAA | |
| | | GCGCCAGCACCGCCTACATGGAGCTTTCATCCCTCCGGA | |
| | | GCGAGGATACTGCCGTATACTATTGCGGAAGGGATGCCG | |
| | | GCCTGGAATACTATGCCCTCGACTACTGGGGACAGGGGA | |
| | | CCCTCGTGACTGTGTCCAGCGCGAGCACCAAGGGCCCC | |
| | | AGCGTGTTCCCGCTGGCCCCATCATCCAAGTCCACCTCG | |
| | | GGAGGGACTGCTGCGCTCGGTTGCCTTGTGAAGGACTAC | |
| | | TTCCCCGAGCCCGTGACTGTGTCGTGGAACAGCGGGGC | |
| | | TCTGACCAGCGGGGTTCACACCTTTCCCGCCGTGCTGCA | |
| | | GTCCTCGGGACTCTACAGCCTGTCCTCCGTGGTCACGGT | |
| | | CCCGTCGTCGTCGCTGGGGACCCAGACCTACATTTGCAA | |
| | | CGTGAACCACAAACCCTCCAACACAAAAGTGGACAAAAG | |
| | | GGTGGAACCTAAGTCCTGTGGAGGGGGTGGATCAGGCG | |
| | | GAGGAGGATCGGAAGTCCAGCTCGTCGAATCAGGGGGA | |
| | | GGGCTTGTGCAACCAGGAGGCTCCCTCAAGCTGTCTTGC | |
| | | GCAGCGTCCGGTTTCACTTTCAACACTTATGCGATGAATT | |
| | | GGGTCCGCCAAGCCAGTGGGAAGGGCCTGGAGTGGGTC | |
| | | GGACGGATCAGATCCAAGTACAACAACTACGCGACATAC | |
| | | TACGCCGACTCCGTGAAGGATCGCTTCACCATCAGCCGG | |
| | | GATGACTCCAAGAGCACCTTGTACCTCCAAATGAACAGC | |
| | | CTTAAGACCGAGGACACTGCGGTGTACTACTGCGTGAGA | |
| | | CACGGCAACTTCGGAAACTCCTACGTGTCCTGGTTCGCC | |
| | | TACTGGGGACAGGGCACCCTTGTCACTGTGTCAAGCGGA | |
| | | GGCGGTGGTTCGGGTGGCGGAGGTTCCGGAGGAGGAG | |
| | | GTTCGGGCGGTGGTGGATCACAGGCCGTCGTGACTCAG | |
| | | GAACCATCCCTGACTGTGTCCCCCGGTGGAACCGTGACC | |
| | | CTCACCTGTCGCTCCTCAACCGGAGCCGTGACCACCTCC | |
| | | AACTACGCTAATTGGGTGCAGCAGAAGCCAGGACAAGCC | |
| | | CCACGGGGACTGATTGGGGGCACCAACAAGAGGGCTCC | |
| | | TTGGACCCCAGCCCGCTTCTCGGGCTCCCTGTTGGGCGA | |
| | | CAAGGCCGCTCTGACCCTGTCCGGTGCACAGCCGGAGG | |
| | | ATGAAGCCGAATACTTCTGCGCGCTGTGGTACTCCAACC | |
| | | TCTGGGTGTTCGGCGGAGGGACCAAGCTGACTGTGTTG | |
| | | GGAGGAGGGGGGAGTGACAAGACTCACACGTGTCCGCC | |
| | | TTGCCCAGCACCCGAGCTACTGGGAGGACCGAGCGTGT | |
| | | TCCTGTTTCCCCCGAAGCCGAAGGATACCCTGATGATCT | |
| | | CCCGCACTCCTGAAGTGACTTGCGTGGTGGTGGCAGTGT | |
| | | CCCACGAGGACCCGGAAGTCAAGTTTAATTGGTACGTGG | |
| | | ATGGCGTGGAGGTGCACAACGCAAAGACCAAGCCTCGC | |
| | | GAGGAGCAGTACGCCAGCACCTACCGGGTGGTGTCCGT | |
| | | CCTGACGGTGCTGCACCAGGACTGGCTGAACGGGAAGG | |
| | | AGTACAAGTGCAAAGTGTCAAATAAGGCTTTGGCCGCCC | |
| | | CTATTGAGAAAACCATCTCAAAGGCCAAGGGCCAACCCA | |
| | | GGGAACCTCAAGTGTGCACCCTCCCACCTTCGCGAGAAG | |
| | | AGATGACCAAGAACCAGGTGTCCCTGTCCTGCGCCGTGA | |
| | | AGGGCTTCTACCCCTCCGATATCGCCGTGGAGTGGGAAT | |
| | | CTAACGGACAGCCGGAGAACAACTACAAGACCACTCCGC | |
| | | CGGTGCTGGACAGCGACGGCTCCTTCTTCCTCGTGTCGA | |
| | | AACTGACCGTGGACAAGTCACGGTGGCAGCAGGGCAAT | |
| | | GTGTTCAGCTGCTCAGTCATGCATGAGGCCCTCCACAAC | |
| | | CACTACACTCAGAAGTCCCTGTCGCTTTCCCCCGGAAAA | |
| | First Half | ATGTCGGTCCTGACCCAAGTGCTGGCCCTCCTTCTCCTG | 89 |
| | Antibody | TGGCTGACCGGGACCAGATGCGAAATCGTCATGACTCAG | |
| | Light Chain | AGCCCGGCAACCCTGTCCGTGAGCCCTGGAGAACGGGC | |
| | (includes | CACTCTGAGCTGTCGGGCGTCACAGGACGTGGGAACTG | |
| | signal | CCGTGGCCTGGTATCAGCAGAAGCCGGGACAGGCTCCT | |
| | peptide | AGGTTGCTCATCTACTGGGCGTCCACTCGCCACACCGGA | |
| | sequence) | ATCCCAGCCCGCTTCTCCGGCTCGGGTTCTGGCACCGAG | |
| | | TTCACCCTGACCATTTCCTCCCTCCAATCCGAGGATTTCG | |
| | | CCGTGTACTTCTGCCAACAATACGCCAACTTCCCCCTGTA | |
| | | CACATTTGGCCAGGGGACCAAGCTGGAGATTAAGCGTAC | |
| | | GGTGGCCGCTCCCAGCGTGTTCATCTTCCCCCCCAGCGA | |
| | | CGAGCAGCTGAAGAGCGGCACCGCCAGCGTGGTGTGCC | |
| | | TGCTGAACAACTTCTACCCCCGGGAGGCCAAGGTGCAGT | |
| | | GGAAGGTGGACAACGCCCTGCAGAGCGGCAACAGCCAG | |
| | | GAGAGCGTCACCGAGCAGGACAGCAAGGACTCCACCTA | |
| | | CAGCCTGAGCAGCACCCTGACCCTGAGCAAGGCCGACT | |
| | | ACGAGAAGCATAAGGTGTACGCCTGCGAGGTGACCCACC | |
| | | AGGGCCTGTCCAGCCCCGTGACCAAGAGCTTCAACAGG | |
| | | GGCGAGTGC | |
| | Second Half | ATGCCTCTGCTGCTCCTGCTGCCTCTGCTCTGGGCCGGA | 90 |
| | Antibody | GCTTTGGCATCACAGCAAATCTACGGCGTGGTGTACGGC | |
| | (includes | AACGTGACCTTCCATGTCCCCTCCAATGTGCCGCTGAAG | |
| | signal | GAAGTGCTCTGGAAGAAGCAGAAGGACAAGGTCGCGGA | |
| | peptide | ACTGGAAAACTCCGAGTTTCGCGCCTTCTCCTCCTTCAAA | |
| | sequence) | AACCGGGTGTACCTGGACACCGTGTCCGGGAGCCTTACT | |
| | | ATCTACAACCTGACCTCCTCGGACGAGGATGAGTATGAG | |
| | | ATGGAGAGCCCAAACATTACCGACACCATGAAGTTCTTCC | |
| | | TCTACGTGCTGGAATCGGGTGGAGGCGGAAGCGATAAG | |
| | | ACTCACACGTGTCCACCTTGTCCCGCACCCGAACTCCTG | |
| | | GGGGGACCTTCCGTGTTTCTCTTCCCCCCTAAACCGAAG | |
| | | GACACCTTGATGATCTCCCGCACTCCTGAAGTGACCTGT | |
| | | GTGGTGGTGGCCGTGTCCCACGAGGACCCAGAAGTCAA | |
| | | GTTTAATTGGTACGTGGACGGAGTCGAGGTGCACAACGC | |
| | | GAAAACCAAACCGCGGGAGGAGCAGTACGCCTCCACCTA | |
| | | CCGGGTGGTGTCCGTCCTCACTGTGCTGCACCAGGACTG | |
| | | GCTCAACGGAAAGGAGTACAAGTGCAAAGTGTCCAACAA | |
| | | AGCCTTGGCGGCCCCAATCGAAAAGACGATCTCCAAGGC | |
| | | CAAGGGACAGCCGCGCGAACCTCAAGTCTACACCCTGCC | |
| | | TCCTTGCCGCGAGGAAATGACCAAGAACCAGGTGTCACT | |
| | | GTGGTGTCTGGTCAAGGGATTCTACCCTTCCGATATCGC | |
| | | AGTGGAGTGGGAAAGCAACGGCCAACCAGAGAACAACTA | |
| | | TAAGACCACACCCCCGGTGCTCGATTCCGACGGCTCATT | |
| | | CTTCCTGTACTCCAAGCTGACCGTGGACAAGTCACGGTG | |
| | | GCAGCAGGGGAACGTGTTCAGCTGCTCCGTGATGCATGA | |
| | | AGCCCTGCACAATCATTACACTCAGAAGTCCCTGTCGCT | |
| | | GAGCCCCGGAAAA | |
| CD3med | First Half | ATGCCACTGCTGCTTCTACTGCCACTCCTGTGGGCAGGA | 91 |
| TSP1 | Antibody | GCACTGGCCCAAGTGCAACTGGTGCAGTCCGGTGCCGA | |
| (H variant) | Heavy Chain | AGTGAAGAAGCCCGGTGCCTCTGTGAAGGTGTCCTGCAA | |
| | (includes | GGCGTCGGGATACACGTTCACCACTTACTGGATTCAGTG | |
| | signal | GGTCAGACAGGCCCCGGGACAGAGACTGGAGTGGATGG | |
| | peptide | GAGCCGTGTACCCCGGAGATGCAGACACTCGCTACACCC | |
| | sequence) | AGAAGTTCCAGGGCCGCGTGACTTTGACCGCCGACAGAA | |
| | | GCGCCAGCACCGCCTACATGGAGCTTTCATCCCTCCGGA | |
| | | GCGAGGATACTGCCGTATACTATTGCGGAAGGGATGCCG | |
| | | GCCTGGAATACTATGCCCTCGACTACTGGGGACAGGGGA | |
| | | CCCTCGTGACTGTGTCCAGCGCGAGCACCAAGGGCCCG | |
| | | AGCGTGTTCCCATTGGCCCCGTCGTCAAAGTCCACCTCT | |
| | | GGCGGAACTGCGGCTCTGGGATGTCTCGTGAAGGACTA | |
| | | CTTTCCGGAACCCGTGACTGTGTCCTGGAACAGCGGCGC | |
| | | CCTCACTTCCGGCGTGCATACCTTCCCTGCCGTGCTGCA | |
| | | GTCCTCCGGCCTGTACAGCCTCAGCAGCGTCGTGACTGT | |
| | | GCCCTCCTCGTCCTTGGGCACCCAGACCTACATCTGCAA | |
| | | CGTCAACCACAAGCCCTCGAACACCAAAGTGGATAAGCG | |
| | | GGTGGAACCCAAGAGCTGTGGAGGGGGTGGCTCAGGAG | |
| | | GAGGGGGATCCGAAGTGCAGCTCGTGGAGTCCGGAGGA | |
| | | GGCCTGGTGCAGCCTGGGGGATCCCTCAAGCTTAGCTG | |
| | | CGCCGCATCAGGCTTCACCTTCAACACCTACGCCATGAA | |
| | | CTGGGTCCGCCAAGCATCCGGAAAGGGCCTGGAATGGG | |
| | | TCGGGAGAATCAGATCCAAGTACAACAACTACGCCACGT | |
| | | ACTACGCGGACTCCGTCAAGGACCGGTTCACTATTAGCC | |
| | | GGGATGACTCCAAGAATACCGCGTACCTTCAGATGAACT | |
| | | CGCTCAAAACCGAGGACACTGCCGTGTATTACTGCGTGC | |
| | | GGCACGGAAACTTCGGGAACAGTTACGTGTCCTGGTTCG | |
| | | CCCATTGGGGTCAAGGCACCCTGGTCACCGTGTCCTCGG | |
| | | GTGGTGGTGGCTCCGGTGGAGGAGGATCGGGGGGTGG | |
| | | AGGATCTGGGGGAGGCGGATCACAGGCGGTCGTGACTC | |
| | | AGGAGCCCTCCCTGACCGTGTCGCCTGGTGGCACCGTG | |
| | | ACTCTGACTTGCGGAAGCTCAACAGGCGCCGTGACCTCC | |
| | | TCGAACTACGCCAACTGGGTGCAACAGAAGCCGGGACAA | |
| | | GCCCCTAGGGGACTGATCGGGGGGACCAACAAGCGCGC | |
| | | TCCGTGGACTCCCGCGAGGTTCTCCGGAAGCCTCCTGG | |
| | | GAGGGAAGGCAGCCCTGACCCTGTCCGGAGCTCAGCCA | |
| | | GAAGATGAGGCCGAGTACTATTGCGCCCTGTGGTACTCG | |
| | | AATCTGTGGGTGTTTGGAGGCGGCACCAAGCTGACCGTC | |
| | | CTGGGTGGTGGCGGAAGCGACAAGACTCACACGTGTCC | |
| | | GCCTTGCCCAGCACCCGAGCTACTGGGAGGACCGAGCG | |
| | | TGTTCCTGTTTCCCCCGAAGCCGAAGGATACCCTGATGA | |
| | | TCTCCCGCACTCCTGAAGTGACTTGCGTGGTGGTGGCAG | |
| | | TGTCCCACGAGGACCCGGAAGTCAAGTTTAATTGGTACG | |
| | | TGGATGGCGTGGAGGTGCACAACGCAAAGACCAAGCCT | |
| | | CGCGAGGAGCAGTACGCCAGCACCTACCGGGTGGTGTC | |
| | | CGTCCTGACGGTGCTGCACCAGGACTGGCTGAACGGGA | |
| | | AGGAGTACAAGTGCAAAGTGTCAAATAAGGCTTTGGCCG | |
| | | CCCCTATTGAGAAAACCATCTCAAAGGCCAAGGGCCAAC | |
| | | CCAGGGAACCTCAAGTGTGCACCCTCCCACCTTCGCGAG | |
| | | AAGAGATGACCAAGAACCAGGTGTCCCTGTCCTGCGCCG | |
| | | TGAAGGGCTTCTACCCCTCCGATATCGCCGTGGAGTGGG | |
| | | AATCTAACGGACAGCCGGAGAACAACTACAAGACCACTC | |
| | | CGCCGGTGCTGGACAGCGACGGCTCCTTCTTCCTCGTGT | |
| | | CGAAACTGACCGTGGACAAGTCACGGTGGCAGCAGGGC | |
| | | AATGTGTTCAGCTGCTCAGTCATGCATGAGGCCCTCCAC | |
| | | AACCACTACACTCAGAAGTCCCTGTCGCTTTCCCCCGGA | |
| | | AAA | |
| | First Half | GAAATCGTCATGACTCAGAGCCCGGCAACCCTGTCCGTG | 92 |
| | Antibody | AGCCCTGGAGAACGGGCCACTCTGAGCTGTCGGGCGTC | |
| | Light Chain | ACAGGACGTGGGAACTGCCGTGGCCTGGTATCAGCAGA | |
| | (includes | AGCCGGGACAGGCTCCTAGGTTGCTCATCTACTGGGCGT | |
| | signal | CCACTCGCCACACCGGAATCCCAGCCCGCTTCTCCGGCT | |
| | peptide | CGGGTTCTGGCACCGAGTTCACCCTGACCATTTCCTCCC | |
| | sequence) | TCCAATCCGAGGATTTCGCCGTGTACTTCTGCCAACAATA | |
| | | CGCCAACTTCCCCCTGTACACATTTGGCCAGGGGACCAA | |
| | | GCTGGAGATTAAGCGTACGGTGGCCGCTCCCAGCGTGTT | |
| | | CATCTTCCCCCCCAGCGACGAGCAGCTGAAGAGCGGCA | |
| | | CCGCCAGCGTGGTGTGCCTGCTGAACAACTTCTACCCCC | |
| | | GGGAGGCCAAGGTGCAGTGGAAGGTGGACAACGCCCTG | |
| | | CAGAGCGGCAACAGCCAGGAGAGCGTCACCGAGCAGGA | |
| | | CAGCAAGGACTCCACCTACAGCCTGAGCAGCACCCTGAC | |
| | | CCTGAGCAAGGCCGACTACGAGAAGCATAAGGTGTACGC | |
| | | CTGCGAGGTGACCCACCAGGGCCTGTCCAGCCCCGTGA | |
| | | CCAAGAGCTTCAACAGGGGCGAGTGC | |
| | Second Half | ATGCCTCTGCTGCTCCTGCTGCCTCTGCTCTGGGCCGGA | 90 |
| | Antibody | GCTTTGGCATCACAGCAAATCTACGGCGTGGTGTACGGC | |
| | (includes | AACGTGACCTTCCATGTCCCCTCCAATGTGCCGCTGAAG | |
| | signal | GAAGTGCTCTGGAAGAAGCAGAAGGACAAGGTCGCGGA | |
| | peptide | ACTGGAAAACTCCGAGTTTCGCGCCTTCTCCTCCTTCAAA | |
| | sequence) | AACCGGGTGTACCTGGACACCGTGTCCGGGAGCCTTACT | |
| | | ATCTACAACCTGACCTCCTCGGACGAGGATGAGTATGAG | |
| | | ATGGAGAGCCCAAACATTACCGACACCATGAAGTTCTTCC | |
| | | TCTACGTGCTGGAATCGGGTGGAGGCGGAAGCGATAAG | |
| | | ACTCACACGTGTCCACCTTGTCCCGCACCCGAACTCCTG | |
| | | GGGGGACCTTCCGTGTTTCTCTTCCCCCCTAAACCGAAG | |
| | | GACACCTTGATGATCTCCCGCACTCCTGAAGTGACCTGT | |
| | | GTGGTGGTGGCCGTGTCCCACGAGGACCCAGAAGTCAA | |
| | | GTTTAATTGGTACGTGGACGGAGTCGAGGTGCACAACGC | |
| | | GAAAACCAAACCGCGGGAGGAGCAGTACGCCTCCACCTA | |
| | | CCGGGTGGTGTCCGTCCTCACTGTGCTGCACCAGGACTG | |
| | | GCTCAACGGAAAGGAGTACAAGTGCAAAGTGTCCAACAA | |
| | | AGCCTTGGCGGCCCCAATCGAAAAGACGATCTCCAAGGC | |
| | | CAAGGGACAGCCGCGCGAACCTCAAGTCTACACCCTGCC | |
| | | TCCTTGCCGCGAGGAAATGACCAAGAACCAGGTGTCACT | |
| | | GTGGTGTCTGGTCAAGGGATTCTACCCTTCCGATATCGC | |
| | | AGTGGAGTGGGAAAGCAACGGCCAACCAGAGAACAACTA | |
| | | TAAGACCACACCCCCGGTGCTCGATTCCGACGGCTCATT | |
| | | CTTCCTGTACTCCAAGCTGACCGTGGACAAGTCACGGTG | |
| | | GCAGCAGGGGAACGTGTTCAGCTGCTCCGTGATGCATGA | |
| | | AGCCCTGCACAATCATTACACTCAGAAGTCCCTGTCGCT | |
| | | GAGCCCCGGAAAA | |
| CD3hi | First Half | ATGCCACTGCTGCTTCTACTGCCACTCCTGTGGGCAGGA | 88 |
| BSP1 | Antibody | GCACTGGCCCAAGTGCAACTGGTGCAGTCCGGTGCCGA | |
| (H variant) | Heavy Chain | AGTGAAGAAGCCCGGTGCCTCTGTGAAGGTGTCCTGCAA | |
| | (includes | GGCGTCGGGATACACGTTCACCACTTACTGGATTCAGTG | |
| | signal | GGTCAGACAGGCCCCGGGACAGAGACTGGAGTGGATGG | |
| | peptide | GAGCCGTGTACCCCGGAGATGCAGACACTCGCTACACCC | |
| | sequence) | AGAAGTTCCAGGGCCGCGTGACTTTGACCGCCGACAGAA | |
| | | GCGCCAGCACCGCCTACATGGAGCTTTCATCCCTCCGGA | |
| | | GCGAGGATACTGCCGTATACTATTGCGGAAGGGATGCCG | |
| | | GCCTGGAATACTATGCCCTCGACTACTGGGGACAGGGGA | |
| | | CCCTCGTGACTGTGTCCAGCGCGAGCACCAAGGGCCCC | |
| | | AGCGTGTTCCCGCTGGCCCCATCATCCAAGTCCACCTCG | |
| | | GGAGGGACTGCTGCGCTCGGTTGCCTTGTGAAGGACTAC | |
| | | TTCCCCGAGCCCGTGACTGTGTCGTGGAACAGCGGGGC | |
| | | TCTGACCAGCGGGGTTCACACCTTTCCCGCCGTGCTGCA | |
| | | GTCCTCGGGACTCTACAGCCTGTCCTCCGTGGTCACGGT | |
| | | CCCGTCGTCGTCGCTGGGGACCCAGACCTACATTTGCAA | |
| | | CGTGAACCACAAACCCTCCAACACAAAAGTGGACAAAAG | |
| | | GGTGGAACCTAAGTCCTGTGGAGGGGGTGGATCAGGCG | |
| | | GAGGAGGATCGGAAGTCCAGCTCGTCGAATCAGGGGGA | |
| | | GGGCTTGTGCAACCAGGAGGCTCCCTCAAGCTGTCTTGC | |
| | | GCAGCGTCCGGTTTCACTTTCAACACTTATGCGATGAATT | |
| | | GGGTCCGCCAAGCCAGTGGGAAGGGCCTGGAGTGGGTC | |
| | | GGACGGATCAGATCCAAGTACAACAACTACGCGACATAC | |
| | | TACGCCGACTCCGTGAAGGATCGCTTCACCATCAGCCGG | |
| | | GATGACTCCAAGAGCACCTTGTACCTCCAAATGAACAGC | |
| | | CTTAAGACCGAGGACACTGCGGTGTACTACTGCGTGAGA | |
| | | CACGGCAACTTCGGAAACTCCTACGTGTCCTGGTTCGCC | |
| | | TACTGGGGACAGGGCACCCTTGTCACTGTGTCAAGCGGA | |
| | | GGCGGTGGTTCGGGTGGCGGAGGTTCCGGAGGAGGAG | |
| | | GTTCGGGCGGTGGTGGATCACAGGCCGTCGTGACTCAG | |
| | | GAACCATCCCTGACTGTGTCCCCCGGTGGAACCGTGACC | |
| | | CTCACCTGTCGCTCCTCAACCGGAGCCGTGACCACCTCC | |
| | | AACTACGCTAATTGGGTGCAGCAGAAGCCAGGACAAGCC | |
| | | CCACGGGGACTGATTGGGGGCACCAACAAGAGGGCTCC | |
| | | TTGGACCCCAGCCCGCTTCTCGGGCTCCCTGTTGGGCGA | |
| | | CAAGGCCGCTCTGACCCTGTCCGGTGCACAGCCGGAGG | |
| | | ATGAAGCCGAATACTTCTGCGCGCTGTGGTACTCCAACC | |
| | | TCTGGGTGTTCGGCGGAGGGACCAAGCTGACTGTGTTG | |
| | | GGAGGAGGGGGGAGTGACAAGACTCACACGTGTCCGCC | |
| | | TTGCCCAGCACCCGAGCTACTGGGAGGACCGAGCGTGT | |
| | | TCCTGTTTCCCCCGAAGCCGAAGGATACCCTGATGATCT | |
| | | CCCGCACTCCTGAAGTGACTTGCGTGGTGGTGGCAGTGT | |
| | | CCCACGAGGACCCGGAAGTCAAGTTTAATTGGTACGTGG | |
| | | ATGGCGTGGAGGTGCACAACGCAAAGACCAAGCCTCGC | |
| | | GAGGAGCAGTACGCCAGCACCTACCGGGTGGTGTCCGT | |
| | | CCTGACGGTGCTGCACCAGGACTGGCTGAACGGGAAGG | |
| | | AGTACAAGTGCAAAGTGTCAAATAAGGCTTTGGCCGCCC | |
| | | CTATTGAGAAAACCATCTCAAAGGCCAAGGGCCAACCCA | |
| | | GGGAACCTCAAGTGTGCACCCTCCCACCTTCGCGAGAAG | |
| | | AGATGACCAAGAACCAGGTGTCCCTGTCCTGCGCCGTGA | |
| | | AGGGCTTCTACCCCTCCGATATCGCCGTGGAGTGGGAAT | |
| | | CTAACGGACAGCCGGAGAACAACTACAAGACCACTCCGC | |
| | | CGGTGCTGGACAGCGACGGCTCCTTCTTCCTCGTGTCGA | |
| | | AACTGACCGTGGACAAGTCACGGTGGCAGCAGGGCAAT | |
| | | GTGTTCAGCTGCTCAGTCATGCATGAGGCCCTCCACAAC | |
| | | CACTACACTCAGAAGTCCCTGTCGCTTTCCCCCGGAAAA | |
| | First Half | ATGTCGGTCCTGACCCAAGTGCTGGCCCTCCTTCTCCTG | 89 |
| | Antibody | TGGCTGACCGGGACCAGATGCGAAATCGTCATGACTCAG | |
| | Light Chain | AGCCCGGCAACCCTGTCCGTGAGCCCTGGAGAACGGGC | |
| | (includes | CACTCTGAGCTGTCGGGCGTCACAGGACGTGGGAACTG | |
| | signal | CCGTGGCCTGGTATCAGCAGAAGCCGGGACAGGCTCCT | |
| | peptide | AGGTTGCTCATCTACTGGGCGTCCACTCGCCACACCGGA | |
| | sequence) | ATCCCAGCCCGCTTCTCCGGCTCGGGTTCTGGCACCGAG | |
| | | TTCACCCTGACCATTTCCTCCCTCCAATCCGAGGATTTCG | |
| | | CCGTGTACTTCTGCCAACAATACGCCAACTTCCCCCTGTA | |
| | | CACATTTGGCCAGGGGACCAAGCTGGAGATTAAGCGTAC | |
| | | GGTGGCCGCTCCCAGCGTGTTCATCTTCCCCCCCAGCGA | |
| | | CGAGCAGCTGAAGAGCGGCACCGCCAGCGTGGTGTGCC | |
| | | TGCTGAACAACTTCTACCCCCGGGAGGCCAAGGTGCAGT | |
| | | GGAAGGTGGACAACGCCCTGCAGAGCGGCAACAGCCAG | |
| | | GAGAGCGTCACCGAGCAGGACAGCAAGGACTCCACCTA | |
| | | CAGCCTGAGCAGCACCCTGACCCTGAGCAAGGCCGACT | |
| | | ACGAGAAGCATAAGGTGTACGCCTGCGAGGTGACCCACC | |
| | | AGGGCCTGTCCAGCCCCGTGACCAAGAGCTTCAACAGG | |
| | | GGCGAGTGC | |
| | Second Half | ATGCCTCTGCTGCTCCTGCTGCCTCTGCTCTGGGCCGGA | 93 |
| | Antibody | GCTTTGGCAGATAAGACTCACACGTGTCCACCTTGTCCC | |
| | (includes | GCACCCGAACTCCTGGGGGGACCTTCCGTGTTTCTCTTC | |
| | signal | CCCCCTAAACCGAAGGACACCTTGATGATCTCCCGCACT | |
| | peptide | CCTGAAGTGACCTGTGTGGTGGTGGCCGTGTCCCACGA | |
| | sequence) | GGACCCAGAAGTCAAGTTTAATTGGTACGTGGACGGAGT | |
| | | CGAGGTGCACAACGCGAAAACCAAACCGCGGGAGGAGC | |
| | | AGTACGCCTCCACCTACCGGGTGGTGTCCGTCCTCACTG | |
| | | TGCTGCACCAGGACTGGCTCAACGGAAAGGAGTACAAGT | |
| | | GCAAAGTGTCCAACAAAGCCTTGGCGGCCCCAATCGAAA | |
| | | AGACGATCTCCAAGGCCAAGGGACAGCCGCGCGAACCT | |
| | | CAAGTCTACACCCTGCCTCCTTGCCGCGAGGAAATGACC | |
| | | AAGAACCAGGTGTCACTGTGGTGTCTGGTCAAGGGATTC | |
| | | TACCCTTCCGATATCGCAGTGGAGTGGGAAAGCAACGGC | |
| | | CAACCAGAGAACAACTATAAGACCACACCCCCGGTGCTC | |
| | | GATTCCGACGGCTCATTCTTCCTGTACTCCAAGCTGACC | |
| | | GTGGACAAGTCACGGTGGCAGCAGGGGAACGTGTTCAG | |
| | | CTGCTCCGTGATGCATGAAGCCCTGCACAATCATTACACT | |
| | | CAGAAGTCCCTGTCGCTGAGCCCCGGAAAA | |
| CD3hi | First Half | ATGCCTCTGCTGCTCCTGTTGCCCCTGCTGTGGGCTGGA | 94 |
| TSP1C | Antibody | GCCTTGGCCCAAGTGCAGCTTCAGCAGTCGGGACCCGG | |
| (H variant) | Heavy Chain | ACTCGTGAAGCCGTCGCAGACGCTGTCCCTGACCTGTGC | |
| | (includes | CATTAGCGGCGACTCCGTGAGCAGCAACAGCGCAGCCT | |
| | signal | GGTCCTGGATTCGGCAGTCACCTGGTCGGGGGCTTGAAT | |
| | peptide | GGCTGGGACGGATCTACTACCGCTCGAAATGGTATAACG | |
| | sequence) | ACTACGCCGTGTCTGTGAAGTCCAGGATCACCATCAACC | |
| | | CGGACACCTCCAAGAATCAGTTCTCCCTCCAACTGAACTC | |
| | | AGTGACCCCAGAGGACACCGCCGTCTACTACTGCGCGA | |
| | | GACTGGATCACCGCTACCATGAAGATACCGTGTACCCGG | |
| | | GGATGGACGTCTGGGGCCAGGGTACTCTCGTCACTGTGT | |
| | | CCTCCGCGTCCACTAAGGGCCCCAGCGTGTTCCCGCTG | |
| | | GCCCCATCATCCAAGTCCACCTCGGGAGGGACTGCTGC | |
| | | GCTCGGTTGCCTTGTGAAGGACTACTTCCCCGAGCCCGT | |
| | | GACTGTGTCGTGGAACAGCGGGGCTCTGACCAGCGGGG | |
| | | TTCACACCTTTCCCGCCGTGCTGCAGTCCTCGGGACTCT | |
| | | ACAGCCTGTCCTCCGTGGTCACGGTCCCGTCGTCGTCGC | |
| | | TGGGGACCCAGACCTACATTTGCAACGTGAACCACAAAC | |
| | | CCTCCAACACAAAAGTGGACAAAAGGGTGGAACCTAAGT | |
| | | CCTGTGGAGGGGGTGGATCAGGCGGAGGAGGATCGGAA | |
| | | GTCCAGCTCGTCGAATCAGGGGGAGGGCTTGTGCAACC | |
| | | AGGAGGCTCCCTCAAGCTGTCTTGCGCAGCGTCCGGTTT | |
| | | CACTTTCAACACTTATGCGATGAATTGGGTCCGCCAAGCC | |
| | | AGTGGGAAGGGCCTGGAGTGGGTCGGACGGATCAGATC | |
| | | CAAGTACAACAACTACGCGACATACTACGCCGACTCCGT | |
| | | GAAGGATCGCTTCACCATCAGCCGGGATGACTCCAAGAG | |
| | | CACCTTGTACCTCCAAATGAACAGCCTTAAGACCGAGGA | |
| | | CACTGCGGTGTACTACTGCGTGAGACACGGCAACTTCGG | |
| | | AAACTCCTACGTGTCCTGGTTCGCCTACTGGGGACAGGG | |
| | | CACCCTTGTCACTGTGTCAAGCGGAGGCGGTGGTTCGG | |
| | | GTGGCGGAGGTTCCGGAGGAGGAGGTTCGGGCGGTGGT | |
| | | GGATCACAGGCCGTCGTGACTCAGGAACCATCCCTGACT | |
| | | GTGTCCCCCGGTGGAACCGTGACCCTCACCTGTCGCTCC | |
| | | TCAACCGGAGCCGTGACCACCTCCAACTACGCTAATTGG | |
| | | GTGCAGCAGAAGCCAGGACAAGCCCCACGGGGACTGAT | |
| | | TGGGGGCACCAACAAGAGGGCTCCTTGGACCCCAGCCC | |
| | | GCTTCTCGGGCTCCCTGTTGGGCGACAAGGCCGCTCTGA | |
| | | CCCTGTCCGGTGCACAGCCGGAGGATGAAGCCGAATACT | |
| | | TCTGCGCGCTGTGGTACTCCAACCTCTGGGTGTTCGGCG | |
| | | GAGGGACCAAGCTGACTGTGTTGGGAGGAGGGGGGAGT | |
| | | GACAAGACTCACACGTGTCCGCCTTGCCCAGCACCCGAG | |
| | | CTACTGGGAGGACCGAGCGTGTTCCTGTTTCCCCCGAAG | |
| | | CCGAAGGATACCCTGATGATCTCCCGCACTCCTGAAGTG | |
| | | ACTTGCGTGGTGGTGGCAGTGTCCCACGAGGACCCGGA | |
| | | AGTCAAGTTTAATTGGTACGTGGATGGCGTGGAGGTGCA | |
| | | CAACGCAAAGACCAAGCCTCGCGAGGAGCAGTACGCCA | |
| | | GCACCTACCGGGTGGTGTCCGTCCTGACGGTGCTGCAC | |
| | | CAGGACTGGCTGAACGGGAAGGAGTACAAGTGCAAAGT | |
| | | GTCAAATAAGGCTTTGGCCGCCCCTATTGAGAAAACCATC | |
| | | TCAAAGGCCAAGGGCCAACCCAGGGAACCTCAAGTGTGC | |
| | | ACCCTCCCACCTTCGCGAGAAGAGATGACCAAGAACCAG | |
| | | GTGTCCCTGTCCTGCGCCGTGAAGGGCTTCTACCCCTCC | |
| | | GATATCGCCGTGGAGTGGGAATCTAACGGACAGCCGGA | |
| | | GAACAACTACAAGACCACTCCGCCGGTGCTGGACAGCGA | |
| | | CGGCTCCTTCTTCCTCGTGTCGAAACTGACCGTGGACAA | |
| | | GTCACGGTGGCAGCAGGGCAATGTGTTCAGCTGCTCAGT | |
| | | CATGCATGAGGCCCTCCACAACCACTACACTCAGAAGTC | |
| | | CCTGTCGCTTTCCCCCGGAAAA | |
| | First Half | ATGTCCGTGCTGACCCAAGTCTTGGCGCTGCTGCTGCTG | 95 |
| | Antibody | TGGCTCACTGGCACCCGCTGTGACATTGAACTGACCCAG | |
| | Light Chain | CCGCCTTCAGTGTCCGTGGCACCCGGACAGACCGCGAG | |
| | (includes | GATTAGCTGCTCCGGGGACAACCTCCCGGCCTACACTGT | |
| | signal | GACCTGGTATCAGCAGAAGCCCGGACAAGCCCCTGTGCT | |
| | peptide | TGTCATCTACGACGACTCGGATCGGCCAAGCGGCATCCC | |
| | sequence) | CGAGAGATTCTCCGGCTCGAACAGCGGGAACACCGCCA | |
| | | CGCTCACTATCTCGGGAACCCAGGCCGAAGATGAGGCTG | |
| | | ACTACTACTGCGCCTCATGGGATCCGTCCTCCGGAGTGG | |
| | | TGTTCGGTGGCGGAACTAAGCTGACCGTGCTGGGTCAGC | |
| | | CTAAGGCGGCGCCCTCAGTGACCCTGTTCCCTCCGTCGT | |
| | | CTGAAGAACTCCAGGCCAACAAGGCCACCCTCGTGTGCC | |
| | | TGATTTCGGACTTCTACCCGGGAGCCGTCACTGTGGCCT | |
| | | GGAAGGCCGACAGCAGCCCAGTGAAGGCCGGCGTGGAA | |
| | | ACTACCACCCCGTCCAAGCAGTCCAACAATAAGTACGCA | |
| | | GCCAGCTCCTACCTGTCCCTGACCCCCGAACAATGGAAG | |
| | | TCACACAGATCCTACTCCTGTCAAGTCACCCACGAGGGC | |
| | | AGCACTGTCGAAAAGACCGTGGCACCGACTGAGTGCTCG | |
| | Second Half | ATGCCTCTGCTGCTCCTGCTGCCTCTGCTCTGGGCCGGA | 90 |
| | Antibody | GCTTTGGCATCACAGCAAATCTACGGCGTGGTGTACGGC | |
| | (includes | AACGTGACCTTCCATGTCCCCTCCAATGTGCCGCTGAAG | |
| | signal | GAAGTGCTCTGGAAGAAGCAGAAGGACAAGGTCGCGGA | |
| | peptide | ACTGGAAAACTCCGAGTTTCGCGCCTTCTCCTCCTTCAAA | |
| | sequence) | AACCGGGTGTACCTGGACACCGTGTCCGGGAGCCTTACT | |
| | | ATCTACAACCTGACCTCCTCGGACGAGGATGAGTATGAG | |
| | | ATGGAGAGCCCAAACATTACCGACACCATGAAGTTCTTCC | |
| | | TCTACGTGCTGGAATCGGGTGGAGGCGGAAGCGATAAG | |
| | | ACTCACACGTGTCCACCTTGTCCCGCACCCGAACTCCTG | |
| | | GGGGGACCTTCCGTGTTTCTCTTCCCCCCTAAACCGAAG | |
| | | GACACCTTGATGATCTCCCGCACTCCTGAAGTGACCTGT | |
| | | GTGGTGGTGGCCGTGTCCCACGAGGACCCAGAAGTCAA | |
| | | GTTTAATTGGTACGTGGACGGAGTCGAGGTGCACAACGC | |
| | | GAAAACCAAACCGCGGGAGGAGCAGTACGCCTCCACCTA | |
| | | CCGGGTGGTGTCCGTCCTCACTGTGCTGCACCAGGACTG | |
| | | GCTCAACGGAAAGGAGTACAAGTGCAAAGTGTCCAACAA | |
| | | AGCCTTGGCGGCCCCAATCGAAAAGACGATCTCCAAGGC | |
| | | CAAGGGACAGCCGCGCGAACCTCAAGTCTACACCCTGCC | |
| | | TCCTTGCCGCGAGGAAATGACCAAGAACCAGGTGTCACT | |
| | | GTGGTGTCTGGTCAAGGGATTCTACCCTTCCGATATCGC | |
| | | AGTGGAGTGGGAAAGCAACGGCCAACCAGAGAACAACTA | |
| | | TAAGACCACACCCCCGGTGCTCGATTCCGACGGCTCATT | |
| | | CTTCCTGTACTCCAAGCTGACCGTGGACAAGTCACGGTG | |
| | | GCAGCAGGGGAACGTGTTCAGCTGCTCCGTGATGCATGA | |
| | | AGCCCTGCACAATCATTACACTCAGAAGTCCCTGTCGCT | |
| | | GAGCCCCGGAAAA | |

### 8.2. Example 2: Ability of BBMs to Elicit Redirected T-Cell Cytotoxic Activity (RTCC) Against CD19+ Target Cells

### 8.2.1. Materials and Methods

[0755] A RTCC assay with the BBMs of Example 1A was performed to measure the ability of the BBMs to elicit RTCC against CD19+ Nalm6-luc and Karpas422-luc cells. Nalm-6 is a human B cell precursor leukemia cell line and Karpas422 is a human B-cell non-hodgkin lymphoma cell line. Briefly, Nalm6 and Karpas422 cells engineered to express the firefly luciferase reporter gene were cultured in RPMI1640 culture media with 10% fetal bovine serum (FBS). 10,000 target cells with serial diluted BBMs or gH isotype antibody control (αgH-CD3hi) were seeded on 384-well flat-bottom microtiter plate. Primary human T cells were isolated from cryopreserved peripheral blood mononuclear cells (PBMCs) and expanded using anti-CD3 and anti-CD28 dynabeads (Thermo fisher, catalog #11131D) and subsequently cryopreserved. Expanded T cells were thawed and aliquoted to the plate to achieve an effector cell (i.e., T cell) to target cell (i.e., cancer cell) ratio (E:T ratio) of 3:1. Plates were incubated in a 37° C. incubator with 5% C02 overnight. Following the co-incubation, Bright Glo (Promega, catalog #E2620) was added to all wells and the luminescence signal was subsequently measured on an Envision (Perkin Elmer). Target cells with Bright Glo served as maximal signal. The percent RTCC of target cells was calculated using the following formula: [100−(sample/maximal signal)*100%].

### 8.2.2. Results

[0756] Results are shown in FIGS. 4A-4B. BBMs based on both NEG258 and NEG218 mediated RTCC activity against Nalm6-luc and Karpas422-luc cells whereas gH isotype antibody (control) was not active, as expected.

### 8.3. Example 3: Ability of BBMs to Elicit T-Cell Proliferation

### 8.3.1. Materials and Methods

[0757] The BBMs described in Example 1A, containing the variable regions of NEG258 and NEG218, were evaluated for their ability to induce T cell proliferation upon co-culture with CD19 expressing target cells. Briefly, Karpas422 and Nalm-6 target cells stably expressing firefly luciferase were irradiated on the day of the assay and plated at a density of 60,000 cells per well in a Costar 96 well plate (Corning, Cat #3904) in T Cell Media (TCM) [RPMI-1640 (ThermoFisher Scientific, Cat #11875-085), 10% FBS (Seradigm, Cat #1500-500), 1% L-Glutamine (Thermo Fisher Scientific, Cat #25830-081), 1% Non Essential Amino Acids (Thermo Fisher Scientific, Cat #11140-050), 1% Pen/Strep (Thermo Fisher Scientific, Cat #15070063), 1% HEPES (Thermo Fisher Scientific, Cat #15630080), Sodium Pyruvate (Thermo Fisher Scientific, Cat #11360-070), 0.1% Beta-mercaptoethanol (Thermo Fisher Scientific, Cat #21985-023)]. Peripheral blood mononuclear cells (PBMCs) previously isolated from Leukopak donors (Hemacare) and cryopreserved were thawed and Pan T cells were isolated by negative selection using the Pan T cell Isolation Kit, human [Miltenyi Biotec, Cat #130-096-535] following the manufacturer's protocol. Isolated T cells were labelled with 5 μM Cell Trace Violet (CTV) (Thermo Fisher Scientific, Cat #C34557) following the manufacturer's protocol and 60,000 CTV labeled T cells were co-cultured with 60,000 target cells to achieve an E:T ratio of 1:1. A dilution series of the NEG258- and NEG218-based BBMs and control binding molecules (αgH-CD3hi) ranging from 16 μM-10,000 μM was added to cells and the plates were incubated in a 5% C02, 37° C. incubator for 96 hrs. After incubation, the cells were harvested, treated with Human TruStain FcX (Fc Block) [Biolegend, Cat #422302] following manufacturer instructions and then stained with Fixable Viability Dye eFlour 780 (ThermoFisher Scientific, Cat #65-0865-14) by incubation at 4C for 30 mins. The cells were then washed twice using FACS Buffer and stained with PerCP-Cy5.5 conjugated anti-human CD3 mAb (Biolegend, Cat #317336) by incubation at 4° C. for 30 mins. The samples were then run on BD LSR Fortessa and analyzed using FlowJo to determine % proliferated CD3+ T cells based on CD3 staining and dilution of Cell Trace Violet dye.

### 8.3.2. Results

[0758] Both NEG258- and NEG218-based BBMs induced proliferation of T cells upon co-culture with two different CD19 expressing target cell lines (FIGS. 5A-5B). The T cell proliferation effect was dose-dependent, and the NEG258-based BBM showed more potent activity than the NEG218-based BBM. The control antibody did not induce any T cell proliferation indicating that CD19 target-specific engagement was required for the proliferation of T cells.

### 8.4. Example 4: Ability of TBMs to Elicit CD2 Dependent T Cell Activation

### 8.4.1. Materials & Methods

[0759] A Jurkat cell line (JNL, an immortalized human T-cell line) that stably expresses a luciferase reporter gene driven by the NFAT promoter was used to measure T cell activation. The level of CD2 expression in JNL cells was confirmed by flow cytometry (FIG. 6A). In order to generate CD2 knockout (KO) cells by CRISPR (Clustered Regularly Interspaced Short Palindromic Repeats), JNL cells were electroporated with a CD2 Cas9 ribonucleoprotein complex. CD2⁻ cells were subsequently sorted to enrich for a uniform CD2⁻ population (FIG. 6B). A JNL reporter assay with CD2⁺ and CD2⁻ JNL cells was then performed to measure bispecfic or trispecific construct-dependent T cell activation. In brief, 10,000 Nalm6 or Karpas422 cells with serial diluted BBMs or TBMs of Example 1A (i.e., R variants) were seeded on 384-well flat-bottom microtiter plate. JNL cells were then added to the plate to achieve effector to target ratio of 3:1. Plates were incubated at a 37° C. incubator with 5% CO₂ for overnight. Following the co-incubation, Bright Glo (Promega, catalog #E2620) was added to all wells and the luminescence signal was subsequently measured on an Envision (Perkin Elmer).

### 8.4.2. Results

[0760] Both BBMs and TBMs induced dose-dependent increase in luminescence when incubated with CD2 WT JNL cells, and the response level was higher with TBMs (FIGS. 6C-6F). When CD2-KO JNL cells were used as effector, decreased T cell activation was observed with TBMs as compared to corresponding BBMs, suggesting that the advantage of TBMs is dependent on CD2 expression on the T cells.

### 8.5. Example 5: Binding of NEG258- and NEG218-Based TBMs to Cyno B Cells

### 8.5.1. Materials and Methods

[0761] Cynomolgus (cyno) PBMCs (iQ Biosciences #IQB-MnPB102) were depleted of CD3+ cells using MACS positive selection (Miltenyi #130-092-012). The remaining cell population was resuspended in a FACS buffer. 100,000 cells per well were plated in a V-bottom 96-well plate, and incubated on ice for one hour with TBMs of Example 1A (i.e., R variants) at 1ug/mL. Following two washes with FACS buffer, the cells were incubated with Alexa-647 labeled anti-human Fc secondary antibody (Jackson Immuno #109-605-098) and cyno cross reactive FITC mouse anti-human CD20 antibody (BD Pharmingen #556632) for one hour on ice. Following two washes with FACS buffer, cells were resuspended in 100 μL of buffer and data was collected on a Beckman Coulter Cytoflex. Cells were analyzed using CytExper v2.3 and gated through CD20 positive population.

### 8.5.2. Results

[0762] Due to their proximal evolutionary relationship to humans, cynomolgus monkeys are the most appropriate preclinical model to analyze the therapeutic effect and potential toxicity of antibody therapeutics, and therefore it is useful for antibodies in clinical development to bind to cynomolgus homolog of their human target. As shown in FIGS. 7A-7B, both the NEG258- and NEG218 TBMs bind to cyno B cells, indicating that the CD19 binding arm recognizes cyno CD19.

### 8.6. Example 6: Ability of TBMs to Induce T Cell Activation Upon Cyno B Cells Depletion in PBMCs

### 8.6.1. Materials & Methods

[0763] An ex vivo cyno B cell depletion assay was conducted to measure the ability of NEG258-based TBMs of Example 1 to lyse CD20 positive B cells in PBMCs (peripheral blood mononuclear cells). In brief, PBMCs were isolated from cynomolgus (cyno) monkey whole blood (BiolVT) using ficoll gradient centrifugation. Isolated PBMCs and serial diluted TBMs of Example 1A (i.e., R variants) were seeded on 96-well flat-bottom microtiter plate. Plates were incubated in a 37° C. incubator with 5% C02 overnight. After 24h of incubation, samples were harvested and simultaneously stained for CD3 and CD20 to identify B and T cells within the PBMC population. To allow quantitative analysis of the cell population, 75,600 counting beads were added prior to the acquisition by flow cytometry. For each sample, 20,000 beads were acquired in order to determine the absolute numbers of B cells. The percent B cell depletion was determined by calculation of the ratio between the number of B cells and the number of beads. For detection of T cell activation, the cells were stained with anti-CD3, anti-CD69 and anti-CD25 (Biolegend and BD Biosciences).

### 8.6.2. Results

[0764] Both NEG258-based TBMs depleted cyno B cells (FIG. 8A) and induced activation of CD3+ T cells as evidence by upregulation of CD69 and CD25 expression (FIGS. 8C-8H). As expected, neither B cell depletion nor T cell activation occurred in the absence of added TBM. These results show both the ability of the NEG258-based TBMs induce activation of cyno T cells as well as the specificity of the activation.

### 8.7. Example 7: Re-Directed T Cell Cytotoxicity by CD19 TBMs

[0765] NEG258- and NEG218 based TBMs of Example 1A (i.e., R variants) (having CD3 ABMs with the VH and VL domains of an anti-CD3 antibody having an affinity to CD3 of 16 nM as measured by Biacore) were analyzed for their potential to induce T cell-mediated apoptosis in tumor target cells.

### 8.7.1. Materials and Methods

[0766] In one study, the TBMs were compared across multiple donor effector cells. Briefly, huCD19-expressing Nalm6 or Karpas422 target cells were engineered to overexpress firefly luciferase. Cells were harvested and resuspended in RPMI medium (Invitrogen #11875-093) with 10% FBS. 2,500 target cells per well were plated in a flat-bottom 384-well plate. Human pan T effector cells were isolated via MACS negative selection (Miltenyi Biotec #130-096-535) from two donors from cryopreserved PBMC (Cellular Technologies Limited #CTL-UP1) then added to the plate to obtain a final E:T ratio of 3:1 or 5:1. Co-cultured cells were incubated with a serial dilution of all constructs and controls. For normalization, average maximum luminescence refers to target cells co-incubated with effector cells, but without any test construct. After an incubation of 24, 48, 72 or 96 hr at 37° C., 5% C02, OneGlo luciferase substrate (Promega #E6120) was added to the plate. Luminescence was measured on an Envision plate reader after a 10 minute incubation. Percent specific lysis was calculated using the following equation: Specific lysis (%)=(1−(sample luminescence/average maximum luminescence))*100

### 8.7.2. Results

[0767] As shown in FIGS. 9A-9P, the TBMs show cytotoxic activity against both Nalm6 target cells (FIGS. 9A-9H) and Karpas422 cells (FIGS. 9I-P) at multiple time points, E:T ratios and effector T cell donors. The NEG258-based TBM appears to be more potent than the NEG218-based TBM.

### 8.8. Example 8: Re-Directed T Cell Cytotoxicity by TBMs with Different CD3 Affinities

[0768] The NEG258-based TBMs of Example 1A (i.e., R variants) with CD3 ABMs (comprising the VH and VL domains of anti-CD3 antibodies having affinities to CD3 of 16 nM, 30 nM and 48 nM as measured by Biacore) were analyzed for their potential to induce T cell-mediated apoptosis in tumor target cells.

### 8.8.1. Materials and Methods

[0769] In one study, the TBMs were compared across multiple donor effector cells. Briefly, huCD19-expressing Nalm6 and Karpas422 target cells were engineered to overexpress firefly luciferase. Cells were harvested and resuspended in RPMI medium (Invitrogen #11875-093) with 10% FBS. 2,500 target cells per well were plated in a flat-bottom 384-well plate. Human pan T effector cells were isolated via MACS negative selection (Miltenyi Biotec #130-096-535) from two donors from cryopreserved PBMCs (Cellular Technologies Limited #CTL-UP1), then added to the plate to obtain a final E:T ratio of 3:1 or 5:1. Co-cultured cells were incubated with serial dilutions of a TBM or control. For normalization, average maximum luminescence refers to target cells co-incubated with effector cells, but without any test construct. After an incubation of 24, 48, 72 or 96 hr at 37° C., 5% C02, OneGlo luciferase substrate (Promega #E6120) was added to the plate. Luminescence was measured on an Envision plate reader after a 10 minute incubation. Percent specific lysis was calculated using the following equation: Specific lysis (%)=(1−(sample luminescence/average maximum luminescence))*100

### 8.8.2. Results

[0770] As shown in FIGS. 10A-10P, the TBMs show cytotoxic activity against both Nalm6 target cells (FIGS. 10A-10H) and Karpas422 (FIGS. 101-10P) at multiple time points, E:T ratios and effector T cell donors.

### 8.9. Example 9: RTCC Activity of the NEG258-Based TBMs Vs. BBMs and TBMs that do not Bind to CD2

[0771] The NEG258- based TBMs of Example 1A (i.e., R variants) containing either a CD2 binding arm or a control lysozyme binding arm were compared for their potential to induce T cell-mediated apoptosis in Nalm6 or Karpas422 target cells target cells. The study also included blinatumomab as a control. Blinatumomab is a bispecific T cell engager, or BiTE, that binds to both CD19 and CD3 but lacks an Fc domain (see, e.g., U.S. Pat. No. 10,191,034).

### 8.9.1. Materials and Methods

[0772] The purified TBMs were compared across multiple donor effector cells. Briefly, huCD19-expressing Nalm6 and Karpas422 target cells were engineered to overexpress firefly luciferase. Cells were harvested and resuspendend in RPMI medium (Invitrogen #11875-093) with 10% FBS. 5,000 target cells per well were plated in a flat-bottom 384-well plate. Human pan T effector cells were isolated via negative selection (Stemcell Technologies #17951) from two donors from cryopreserved PBMCs that were separated from a leukopak (Hemacare #PB001F-1) by Ficoll density gradient centrifugation. Purified T cells were then added to the plate to obtain a final E:T ratio of 3:1, 1:1, 1:3 or 1:5. Co-cultured cells were incubated with serial dilutions of all constructs and controls. For normalization, average maximum luminescence refers to target cells co-incubated with effector cells, but without any test construct. After an incubation of 48, 72 or 96 hr at 37° C., 5% C02, OneGlo luciferase substrate (Promega #E6120) was added to the plate. Luminescence was measured on an Envision plate reader after a 10 minute incubation. Percent specific lysis was calculated using the following equation: Specific lysis (%)=(1−(sample luminescence/average maximum luminescence))*100

### 8.9.2. Results

[0773] As shown in FIGS. 11A-11L, both types of TBMs show cytotoxic activity against both Nalm6 target cells (FIGS. 11A-11H) and Karpas422 cells (FIGS. 11I-11L). The TBM containing a CD2 binding arm demonstrated superior cytotoxic activity compared to the control TBM with a lysozyme binding arm and to blinatumomab, particularly at lower E:T ratios.

### 8.10. Example 10: Cytokine Release Assay

[0774] NEG258- and NEG218-based TBMs of Example 1A (i.e., R variants) were analyzed for their ability to induce T cell-mediated de novo secretion of cytokines in the presence of tumor target cells.

### 8.10.1. Materials and Methods

[0775] Briefly, huCD19-expressing Nalm6 target cells were harvested and resuspended in RPMI medium with 10% FBS. 20,000 target cells per well were plated in a flat-bottom 96-well plate. Human pan T effector cells were isolated via MACS negative selection from cryopreserved PBMC then added to the plate to obtain a final E:T ratio of 5:1. Co-cultured cells were incubated with serial dilutions of all constructs and controls. After an incubation of 24 hr at 37° C., 5% CO2, the supernatants were harvested by centrifugation at 300×g for 5 min for subsequent analysis.

[0776] A multiplexed ELISA was performed according to the manufacturer's instructions using a V-PLEX Proinflammatory Panel 1 Kit (MesoScale Discovery #K15049D).

### 8.10.2. Results

[0777] As shown in FIGS. 12A-12C, both NEG258- and NEG218-based TBMs induce significant cytokine secretion by T cells at all dose levels measured. These figures indicate that they can be effective at lower doses.

### 8.11. Example 11: Binding of NEG258- and NEG218-Based TBMs to Human and Cyno CD19

### 8.11.1. Materials and Methods

[0778] The mouse cell line 300.19 was engineered to overexpress either human CD19 or cyno CD19. Cells were cultured in in RPMI medium (Invitrogen #11875-093) with 10% FBS and 2-mercaptoethanol. Cells were harvested and resuspended in FACS buffer (PBS containing 1% FBS). 50,000 cells per well were plated in a V-bottom 96-well plate. Each cell line was incubated with serial dilutions of TBMs of Example 1A (i.e., R variants) for one hour on ice. Cells were centrifuged for 4 min at 400×g and washed with FACS buffer. This was repeated twice, and then the cells were incubated with Alexa-647 labeled anti-human Fc secondary antibody (Jackson Immuno #109-605-098) for 30 min on ice. The cells were washed twice, then resuspended in 100 μL of FACS buffer. FACS data was collected on a Beckman Coulter Cytoflex and analysis was performed using CytExpert v2.3.

### 8.11.2. Results

[0779] As shown in FIGS. 13A-13B, the NEG258- and NEG218-based TBMs bind to cell lines engineered to overexpress both human and cyno CD19. NEG258 appears to bind equally to both human and cyno while NEG218 appears to have greater affinity for cyno CD19 than human CD19. Of the two, NEG258 appears to have greater affinity for both human CD19 and cyno CD19.

### 8.12. Example 12: Engineering CD58 for Improved Stability

### 8.12.1. Background

[0780] Human CD58 contains a signal peptide of 29 amino acids and two Ig-like domains. The most N-terminal Ig-like domain, referred to as domain 1, is of V-type, similar to a variable region of an antibody, and the second domain, named domain 2, is of C-type, is similar to a constant regions of an antibody. A schematic overview of the CD58 domain structure is shown in FIG. 14.

[0781] As illustrated in Examples 1-11, domain 1 of CD58, which interacts with CD2, can be used in lieu of an anti-CD2 antibody binding fragment in multispecific binding molecules. The use of a CD58 binding arm rather than an anti-CD2 binding arm reduces non-specific immune activation in the absence of target cells. However, CD58 exhibits lower stability than immunoglobulins.

[0782] In order to improve stability of human CD58 domain 1, the protein was engineered to include a pair of cysteine that form a disulfide bridge upon expression to stabilize the molecule.

[0783] Four different pairs of amino acids were engineered to be replaced by cysteines: (1) V45 and M105, (2) V45 and M114, (3) V54 and G88 and (4) W56 and L90.

### 8.12.2. Materials and Methods

### 8.12.2.1. Recombinant Expression

[0784] To assess the binding and biophysical characteristics, the CD58 disulfide variants were transiently produced and purified from HEK293 cells along with the CD2 extracellular domain. All plasmids were codon optimized for mammalian expression. Human and cyno CD2 constructs were produced with a C-terminal Avi-Tag and a N terminal 8×his tag (SEQ ID NO: 769) followed by a EVNLYFQS sequence (SEQ ID NO: 770) for cleavage of the histag after purification. CD2 constructs were site selectively biotinylated during expression via co-transfection of a plasmid encoding the BirA enzyme. CD58 was expressed with a C-terminal 8×his tag (SEQ ID NO: 769). Transient expression and purification in HEK293F cells was performed with standard methodology. The sequences are shown in Table 21.

TABLE 21

| Pro- | | SEQ |
|---|---|---|
| tein | | ID |
| Name | AA Sequence | NO: |
| Human | SKEITNALETWGALGQDINLDIPSFQMSDDIDDIKWEKTS | 1321 |
| CD2 | DKKKIAQFRKEKETFKEKDTYKLFKNGTLKIKHLKTDDQ | |
| | DIYKVSIYDTKGKNVLEKIFDLKIQERVSKPKISWTCINT | |
| | TLTCEVMNGTDPELNLYQDGKHLKLSQRVITHKWTTSLS | |
| | AKFKCTAGNKVSKESSVEPVSCPEKGLDGGGGSGLNDI | |
| | FEAQKIEWHE | |
| Cyno | SKEIRNALETWGALGQDIDLDIPSFQMSDDIDDIRWEKT | 1322 |
| CD2 | SDKKKIAQFRKEKETFEEKDAYKLFKNGTLKIKHLKIHDQ | |
| | DSYKVSIYDTKGKNVLEKTFDLKIQERVSEPKISWTCINT | |
| | TLTCEVMNGTDPELNLYQDGKHVKLSQRVITHKWTTSL | |
| | SAKFKCTAGNKVSKESRMETVSCPEKGLDGGGGSGLN | |
| | DIFEAQKIEWHE | |
| CD58 | SQQIYGVVYGNVTFHVPSNVPLKEVLWKKQKDKVAELE | 1323 |
| Full | NSEFRAFSSFKNRVYLDTVSGSLTIYNLTSSDEDEYEME | |
| ECD | SPNITDTMKFFLYVLESLPSPTLTCALTNGSIEVQCMIPE | |
| | HYNSHRGLIMYSWDCPMEQCKRNSTSIYFKMENDLPQ | |
| | KIQCTLSNPLFNTTSSIILTTCIPSSGHSRHRGGGGSHHH | |
| | HHHHH | |
| CD58_ | SQQIYGVVYGNVTFHVPSNVPLKEVLWKKQKDKVAELE | 1324 |
| IgV | NSEFRAFSSFKNRVYLDTVSGSLTIYNLTSSDEDEYEME | |
| | SPNITDTMKFFLYVLESGGGGSHHHHHHHH | |
| IgV | SQQIYGVVYGNVTFHCPSNVPLKEVLWKKQKDKVAELE | 1325 |
| V45C_ | NSEFRAFSSFKNRVYLDTVSGSLTIYNLTSSDEDEYECE | |
| M105C | SPNITDTMKFFLYVLESGGGGSHHHHHHHH | |
| IgV | SQQIYGVVYGNVTFHVPSNVPLKECLWKKQKDKVAELE | 1326 |
| V54C_ | NSEFRAFSSFKNRVYLDTVSCSLTIYNLTSSDEDEYEME | |
| G88C | SPNITDTMKFFLYVLESGGGGSHHHHHHHH | |
| IgV | SQQIYGVVYGNVTFHCPSNVPLKEVLWKKQKDKVAELE | 1327 |
| V45C_ | NSEFRAFSSFKNRVYLDTVSGSLTIYNLTSSDEDEYEME | |
| M114C | SPNITDTCKFFLYVLESGGGGSHHHHHHHH | |

[0785] For expression, transfection was performed using PEI as transfection reagent. For small scale (<5L) transfections, cells were grown in shake flasks on an orbital shaker (100 rpm) in a humidified incubator (85%) at 8% 002). Transfection was done with a ratio of 1 DNA:3 PEI. 1 mg/L culture of plasmid was used for transfection at 2.0 million cells/mL in Expi293 medium. After 5 days of expression, the culture was centrifuged and filtrated. Purification was performed via Nickel-NTA batch binding using 1 ml resin/100 mL supernatant. The protein was allowed to bind for a minimum of 2 hours with gentle mixing, and the mixture was loaded onto a gravity filtration column. The resin was washed with 30 CV of PBS. Proteins were eluted with imidazole. The eluted protein was concentrated and finally purified via a preparative size exclusion chromatography (Hi Load 16/60 Superdex 75 grade column, GE Healthcare Life Sciences, Uppsala, Sweden). To confirm that the identity of the proteins expressed matched the predicted masses for the primary amino acid sequences, proteins were analyzed by high-performance liquid chromatography coupled to mass spectrometry.

### 8.12.2.2. Stability

[0786] Disulfide stabilized variants were assessed for improved thermal stability using both differential scanning calorimetry (DSC) and differential scanning fluorimetry (DSF) using standard techniques. For DSF, 1-3 ug of each construct was add to 1× Sypro Orange (Thermo-Fisher) in 25ul total volume in 96-well PCR plate. Using a Bio-Rad CFX96 RT-PCR system equipped with C1000 Thermal Cycler, the temperature was increased from 25° C. to 95° C. at 0.5° C./minute and the fluorescence monitored. The manufacturer-supplied software was used to determine Tm.

[0787] For DSC, all samples were dialyzed into HEPES-buffered saline (HBS) and diluted to final concentration of 0.5 mg/mL. Tm and Tonset were determined using a MicroCal VP-Capillary DSC system (Malvern) by increasing temperature from 25° C. to 100° C. at 1° C./minute with a filtering period of 2 seconds and a mid-gain setting.

### 8.12.2.3. Binding Affinity

[0788] To ensure the binding affinity remained uncompromised by the additional of the stabilizing disulfide variance, isothermal calorimetry (ITC) was performed on the resulting recombinant CD58 proteins to determine their apparent KD and binding stoicheometry (n) to recombinant human CD2.

[0789] Briefly, recombinant human CD2 and recombinant human CD58 variants were dialyzed into HEPES-buffered saline (HBS). CD2 was diluted to final concentration of 100 μM, CD58 variants were diluted to 10 μM. CD2 was titrated into 10 μM of CD58 variants via multiple injections and ΔH (kcal/mole) determined using a MicroCal VP-ITC isothermal titration calorimeter (Malvern). Titrations of CD2 into HBS were used as a reference and KD and n determined from the resulting data.

### 8.12.3. Results

[0790] Results for both DSF and DSC measurements for the constructs are shown in Table 22 below.

TABLE 22

| | By Differential | | |
|---|---|---|---|
| | Scanning | By Differential Scanning | |
| | Fluorimetry (DSF) | Calorimetry (DSC) | |
| CD58 variant | Tm (° C.) | Tmonset (° C.) | Tm (° C.) |
| CD58 Full ECD | 59.5 | 48.8 | 65.0 |
| CD58_IgV | 48.5 | 46.3 | 60.9 |
| IgV V45C_M105C | 48.5 | 43.9 | 66.8 |
| IgV V54C_G88C | 76.5 | 66.7 | 80.9 |
| IgV V45C_M114C | 63.5 | 49.6 | 72.5 |

[0791] Results of the affinity studies are shown in Table 23 below. Addition of stabilizing disulfide had no detrimental impact on the affinity or the binding stoicheometry.

TABLE 23

| CD58 variant | KD (uM) | n |
|---|---|---|
| CD58 Full ECD | 0.57 (±0.05) | 0.92 (±0.01) |
| CD58_IgV | 0.61 (±0.07) | 0.96 (±0.01) |
| IgV V45C_M105C | 0.88 (±0.06) | 0.97 (±0.01) |
| IgV V54C_G88C | 0.60 (±0.06) | 0.83 (±.0.01) |
| IgV V45C_M114C | 0.38 (±0.03) | 0.88 (±.0.01) |

### 8.13. Example 13: Production of Anti-CD3-Anti-CD19-CD58 IgG1 TBMs in Knob-into-Holes Format

### 8.13.1. Materials and Methods

[0792] Constructs were synthesized and codon optimized for expression in mammalian cells. For each trispecific construct, three plasmids were synthesized. A first plasmid encoding an anti-CD19 heavy chain was synthesized as a fusion comprising (in the N-terminal to C-terminal direction) (i) a VH domain fused to a constant hIgG1 CH1 domain, (ii) a linker, (iii) an anti-CD3 scFv, (iv) a second linker and (v) a hIgG1 Fc domain containing mutations for a hole to facilitate heterodimerization as well as silencing mutations. A second plasmid encoding a light chain was synthesized as a fusion comprising (in the N-terminal to C-terminal direction) an anti-CD19 VL domain and (ii) a constant human kappa sequence. A third plasmid encoding a second half antibody was synthesized as a fusion comprising (in the N-terminal to C-terminal direction) a CD58 disulfide stabilized variant fused to a constant hIgG1 domain containing mutations for a knob to facilitate heterodimerization as well as silencing mutations. The sequences are shown in Table 24.

TABLE 24

| | | | SEQ |
|---|---|---|---|
| Trispecific | Chain | | ID |
| Name | Description | Sequence | NO: |
| CD19_CTL119 | First Half | QVQLQESGPGLVKPSETLSLTCTVSGVSLPDYG | 1328 |
| _CD3_16nM- | Antibody | VSWIRQPPGKGLEWIGVIWGSETTYYQSSLKSR | |
| CD58_Full | Heavy Chain | VTISKDNSKNQVSLKLSSVTAADTAVYYCAKHY | |
| ECD | (Fc | YYGGSYAMDYWGQGTLVTVSSASTKGPSVFPL | |
| Trispecific | sequence | APSSKSTSGGTAALGCLVKDYFPEPVTVSWNS | |
| | not shown) | GALTSGVHTFPAVLQSSGLYSLSSVVTVPSSSL | |
| | | GTQTYICNVNHKPSNTKVDKRVEPKSCGGGGS | |
| | | GGGGSEVQLVESGGGLVQPGGSLKLSCAASGF | |
| | | TFNTYAMNWVRQASGKGLEWVGRIRSKYNNYA | |
| | | TYYADSVKDRFTISRDDSKSTLYLQMNSLKTED | |
| | | TAVYYCVRHGNFGNSYVSWFAYWGQGTLVTVS | |
| | | SGGGGSGGGGSGGGGSGGGGSQAVVTQEPS | |
| | | LTVSPGGTVTLTCRSSTGAVTTSNYANWVQQK | |
| | | PGQAPRGLIGGTNKRAPWTPARFSGSLLGDKA | |
| | | ALTLSGAQPEDEAEYFCALWYSNLWVFGGGTK | |
| | | LTVLGGGGS | |
| | First Half | QVQLQESGPGLVKPSETLSLTCTVSGVSLPDYG | 1094 |
| | Antibody | VSWIRQPPGKGLEWIGVIWGSETTYYQSSLKSR | |
| | Heavy Chain | VTISKDNSKNQVSLKLSSVTAADTAVYYCAKHY | |
| | (includes Fc | YYGGSYAMDYWGQGTLVTVSSASTKGPSVFPL | |
| | sequence) | APSSKSTSGGTAALGCLVKDYFPEPVTVSWNS | |
| | | GALTSGVHTFPAVLQSSGLYSLSSVVTVPSSSL | |
| | | GTQTYICNVNHKPSNTKVDKRVEPKSCGGGGS | |
| | | GGGGSEVQLVESGGGLVQPGGSLKLSCAASGF | |
| | | TFNTYAMNWVRQASGKGLEWVGRIRSKYNNYA | |
| | | TYYADSVKDRFTISRDDSKSTLYLQMNSLKTED | |
| | | TAVYYCVRHGNFGNSYVSWFAYWGQGTLVTVS | |
| | | SGGGGSGGGGSGGGGSGGGGSQAVVTQEPS | |
| | | LTVSPGGTVTLTCRSSTGAVTTSNYANWVQQK | |
| | | PGQAPRGLIGGTNKRAPWTPARFSGSLLGDKA | |
| | | ALTLSGAQPEDEAEYFCALWYSNLWVFGGGTK | |
| | | LTVLGGGGSDKTHTCPPCPAPELLGGPSVFLFP | |
| | | PKPKDTLMISRTPEVTCVVVAVSHEDPEVKFNW | |
| | | YVDGVEVHNAKTKPREEQYGSTYRVVSVLTVLH | |
| | | QDWLNGKEYKCKVSNKALAAPIEKTISKAKGQP | |
| | | REPQVCTLPPSRDELTKNQVSLSCAVKGFYPSD | |
| | | IAVEWESNGQPENNYKTTPPVLDSDGSFFLVSK | |
| | | LTVDKSRWQQGNVFSCSVMHEALHNHYTQKSL | |
| | | SLSPGK | |
| | Second Half | FSQQIYGVVYGNVTFHVPSNVPLKEVLWKKQKD | 1329 |
| | Antibody | KVAELENSEFRAFSSFKNRVYLDTVSGSLTIYNL | |
| | (Fc | TSSDEDEYEMESPNITDTMKFFLYVLESLPSPTL | |
| | sequence | TCALTNGSIEVQCMIPEHYNSHRGLIMYSWDCP | |
| | not shown) | MEQCKRNSTSIYFKMENDLPQKIQCTLSNPLFN | |
| | | TTSSIILTTCIPSSGHSRHRGGGS | |
| | Second Half | FSQQIYGVVYGNVTFHVPSNVPLKEVLWKKQKD | 1330 |
| | Antibody | KVAELENSEFRAFSSFKNRVYLDTVSGSLTIYNL | |
| | (includes Fc | TSSDEDEYEMESPNITDTMKFFLYVLESLPSPTL | |
| | sequence) | TCALTNGSIEVQCMIPEHYNSHRGLIMYSWDCP | |
| | | MEQCKRNSTSIYFKMENDLPQKIQCTLSNPLFN | |
| | | TTSSIILTTCIPSSGHSRHRGGGSDKTHTCPPCP | |
| | | APELLGGPSVFLFPPKPKDTLMISRTPEVTCVVV | |
| | | DVSHEDPEVKFNWYVDGVEVHNAKTKPREEQY | |
| | | ASTYRVVSVLTVLHQDWLNGKEYKCKVSNKALP | |
| | | APIEKTISKAKGQPREPQVYTLPPCREEMTKNQ | |
| | | VSLWCLVKGFYPSDIAVEWESNGQPENNYKTT | |
| | | PPVLDSDGSFFLYSKLTVDKSRWQQGNVFSCS | |
| | | VMHEALHNRYTQKSLSLSPGK | |
| | First Half | EIVMTQSPATLSLSPGERATLSCRASQDISKYLN | 1331 |
| | Antibody | WYQQKPGQAPRLLIYHTSRLHSGIPARFSGSGS | |
| | Light Chain | GTDYTLTISSLQPEDFAVYFCQQGNTLPYTFGQ | |
| | | GTKLEIKRTVAAPSVFIFPPSDEQLKSGTASVVC | |
| | | LLNNFYPREAKVQWKVDNALQSGNSQESVTEQ | |
| | | DSKDSTYSLSSTLTLSKADYEKHKVYACEVTHQ | |
| | | GLSSPVTKSFNRGEC | |
| CD19_CTL119 | First Half | QVQLQESGPGLVKPSETLSLTCTVSGVSLPDYG | 1328 |
| _CD3_16nM- | Antibody | VSWIRQPPGKGLEWIGVIWGSETTYYQSSLKSR | |
| CD58_IgV | Heavy Chain | VTISKDNSKNQVSLKLSSVTAADTAVYYCAKHY | |
| Trispecific | (Fc | YYGGSYAMDYWGQGTLVTVSSASTKGPSVFPL | |
| | sequence | APSSKSTSGGTAALGCLVKDYFPEPVTVSWNS | |
| | not shown) | GALTSGVHTFPAVLQSSGLYSLSSVVTVPSSSL | |
| | | GTQTYICNVNHKPSNTKVDKRVEPKSCGGGGS | |
| | | GGGGSEVQLVESGGGLVQPGGSLKLSCAASGF | |
| | | TFNTYAMNWVRQASGKGLEWVGRIRSKYNNYA | |
| | | TYYADSVKDRFTISRDDSKSTLYLQMNSLKTED | |
| | | TAVYYCVRHGNFGNSYVSWFAYWGQGTLVTVS | |
| | | SGGGGSGGGGSGGGGSGGGGSQAVVTQEPS | |
| | | LTVSPGGTVTLTCRSSTGAVTTSNYANWVQQK | |
| | | PGQAPRGLIGGTNKRAPWTPARFSGSLLGDKA | |
| | | ALTLSGAQPEDEAEYFCALWYSNLWVFGGGTK | |
| | | LTVLGGGGS | |
| | First Half | QVQLQESGPGLVKPSETLSLTCTVSGVSLPDYG | 1094 |
| | Antibody | VSWIRQPPGKGLEWIGVIWGSETTYYQSSLKSR | |
| | Heavy Chain | VTISKDNSKNQVSLKLSSVTAADTAVYYCAKHY | |
| | (includes Fc | YYGGSYAMDYWGQGTLVTVSSASTKGPSVFPL | |
| | sequence) | APSSKSTSGGTAALGCLVKDYFPEPVTVSWNS | |
| | | GALTSGVHTFPAVLQSSGLYSLSSVVTVPSSSL | |
| | | GTQTYICNVNHKPSNTKVDKRVEPKSCGGGGS | |
| | | GGGGSEVQLVESGGGLVQPGGSLKLSCAASGF | |
| | | TFNTYAMNWVRQASGKGLEWVGRIRSKYNNYA | |
| | | TYYADSVKDRFTISRDDSKSTLYLQMNSLKTED | |
| | | TAVYYCVRHGNFGNSYVSWFAYWGQGTLVTVS | |
| | | SGGGGSGGGGSGGGGSGGGGSQAVVTQEPS | |
| | | LTVSPGGTVTLTCRSSTGAVTTSNYANWVQQK | |
| | | PGQAPRGLIGGTNKRAPWTPARFSGSLLGDKA | |
| | | ALTLSGAQPEDEAEYFCALWYSNLWVFGGGTK | |
| | | LTVLGGGGSDKTHTCPPCPAPELLGGPSVFLFP | |
| | | PKPKDTLMISRTPEVTCVVVAVSHEDPEVKFNW | |
| | | YVDGVEVHNAKTKPREEQYGSTYRVVSVLTVLH | |
| | | QDWLNGKEYKCKVSNKALAAPIEKTISKAKGQP | |
| | | REPQVCTLPPSRDELTKNQVSLSCAVKGFYPSD | |
| | | IAVEWESNGQPENNYKTTPPVLDSDGSFFLVSK | |
| | | LTVDKSRWQQGNVFSCSVMHEALHNHYTQKSL | |
| | | SLSPGK | |
| | Second Half | SQQIYGVVYGNVTFHVPSNVPLKEVLWKKQKD | 65 |
| | Antibody | KVAELENSEFRAFSSFKNRVYLDTVSGSLTIYNL | |
| | (Fc | TSSDEDEYEMESPNITDTMKFFLYVLESGGGGS | |
| | sequence | | |
| | not shown) | | |
| | Second Half | SQQIYGVVYGNVTFHVPSNVPLKEVLWKKQKD | 75 |
| | Antibody | KVAELENSEFRAFSSFKNRVYLDTVSGSLTIYNL | |
| | (includes Fc | TSSDEDEYEMESPNITDTMKFFLYVLESGGGGS | |
| | sequence) | DKTHTCPPCPAPELLGGPSVFLFPPKPKDTLMIS | |
| | | RTPEVTCVVVAVSHEDPEVKFNWYVDGVEVHN | |
| | | AKTKPREEQYASTYRVVSVLTVLHQDWLNGKE | |
| | | YKCKVSNKALAAPIEKTISKAKGQPREPQVYTLP | |
| | | PCREEMTKNQVSLWCLVKGFYPSDIAVEWESN | |
| | | GQPENNYKTTPPVLDSDGSFFLYSKLTVDKSR | |
| | | WQQGNVFSCSVMHEALHNRYTQKSLSLSPGK | |
| | First Half | EIVMTQSPATLSLSPGERATLSCRASQDISKYLN | 1331 |
| | Antibody | WYQQKPGQAPRLLIYHTSRLHSGIPARFSGSGS | |
| | Light Chain | GTDYTLTISSLQPEDFAVYFCQQGNTLPYTFGQ | |
| | | GTKLEIKRTVAAPSVFIFPPSDEQLKSGTASVVC | |
| | | LLNNFYPREAKVQWKVDNALQSGNSQESVTEQ | |
| | | DSKDSTYSLSSTLTLSKADYEKHKVYACEVTHQ | |
| | | GLSSPVTKSFNRGEC | |
| CD19_CTL119 | First Half | QVQLQESGPGLVKPSETLSLTCTVSGVSLPDYG | 1328 |
| _CD3_16nM- | Antibody | VSWIRQPPGKGLEWIGVIWGSETTYYQSSLKSR | |
| CD58_IgV_ | Heavy Chain | VTISKDNSKNQVSLKLSSVTAADTAVYYCAKHY | |
| V45C_M105C | (Fc | YYGGSYAMDYWGQGTLVTVSSASTKGPSVFPL | |
| Trispecific | sequence | APSSKSTSGGTAALGCLVKDYFPEPVTVSWNS | |
| | not shown) | GALTSGVHTFPAVLQSSGLYSLSSVVTVPSSSL | |
| | | GTQTYICNVNHKPSNTKVDKRVEPKSCGGGGS | |
| | | GGGGSEVQLVESGGGLVQPGGSLKLSCAASGF | |
| | | TFNTYAMNWVRQASGKGLEWVGRIRSKYNNYA | |
| | | TYYADSVKDRFTISRDDSKSTLYLQMNSLKTED | |
| | | TAVYYCVRHGNFGNSYVSWFAYWGQGTLVTVS | |
| | | SGGGGSGGGGSGGGGSGGGGSQAVVTQEPS | |
| | | LTVSPGGTVTLTCRSSTGAVTTSNYANWVQQK | |
| | | PGQAPRGLIGGTNKRAPWTPARFSGSLLGDKA | |
| | | ALTLSGAQPEDEAEYFCALWYSNLWVFGGGTK | |
| | | LTVLGGGGS | |
| | First Half | QVQLQESGPGLVKPSETLSLTCTVSGVSLPDYG | 1094 |
| | Antibody | VSWIRQPPGKGLEWIGVIWGSETTYYQSSLKSR | |
| | Heavy Chain | VTISKDNSKNQVSLKLSSVTAADTAVYYCAKHY | |
| | (includes Fc | YYGGSYAMDYWGQGTLVTVSSASTKGPSVFPL | |
| | sequence) | APSSKSTSGGTAALGCLVKDYFPEPVTVSWNS | |
| | | GALTSGVHTFPAVLQSSGLYSLSSVVTVPSSSL | |
| | | GTQTYICNVNHKPSNTKVDKRVEPKSCGGGGS | |
| | | GGGGSEVQLVESGGGLVQPGGSLKLSCAASGF | |
| | | TFNTYAMNWVRQASGKGLEWVGRIRSKYNNYA | |
| | | TYYADSVKDRFTISRDDSKSTLYLQMNSLKTED | |
| | | TAVYYCVRHGNFGNSYVSWFAYWGQGTLVTVS | |
| | | SGGGGSGGGGSGGGGSGGGGSQAVVTQEPS | |
| | | LTVSPGGTVTLTCRSSTGAVTTSNYANWVQQK | |
| | | PGQAPRGLIGGTNKRAPWTPARFSGSLLGDKA | |
| | | ALTLSGAQPEDEAEYFCALWYSNLWVFGGGTK | |
| | | LTVLGGGGSDKTHTCPPCPAPELLGGPSVFLFP | |
| | | PKPKDTLMISRTPEVTCVVVAVSHEDPEVKFNW | |
| | | YVDGVEVHNAKTKPREEQYGSTYRVVSVLTVLH | |
| | | QDWLNGKEYKCKVSNKALAAPIEKTISKAKGQP | |
| | | REPQVCTLPPSRDELTKNQVSLSCAVKGFYPSD | |
| | | IAVEWESNGQPENNYKTTPPVLDSDGSFFLVSK | |
| | | LTVDKSRWQQGNVFSCSVMHEALHNHYTQKSL | |
| | | SLSPGK | |
| | Second Half | SQQIYGVVYGNVTFHCPSNVPLKEVLWKKQKD | 1332 |
| | Antibody | KVAELENSEFRAFSSFKNRVYLDTVSGSLTIYNL | |
| | (Fc | TSSDEDEYECESPNITDTMKFFLYVLESGS | |
| | sequence | | |
| | not shown) | | |
| | Second Half | SQQIYGVVYGNVTFHCPSNVPLKEVLWKKQKD | 1333 |
| | Antibody | KVAELENSEFRAFSSFKNRVYLDTVSGSLTIYNL | |
| | (includes Fc | TSSDEDEYECESPNITDTMKFFLYVLESGSDKT | |
| | sequence) | HTCPPCPAPELLGGPSVFLFPPKPKDTLMISRTP | |
| | | EVTCVVVDVSHEDPEVKFNWYVDGVEVHNAKT | |
| | | KPREEQYASTYRVVSVLTVLHQDWLNGKEYKC | |
| | | KVSNKALPAPIEKTISKAKGQPREPQVYTLPPCR | |
| | | EEMTKNQVSLWCLVKGFYPSDIAVEWESNGQP | |
| | | ENNYKTTPPVLDSDGSFFLYSKLTVDKSRWQQ | |
| | | GNVFSCSVMHEALHNRYTQKSLSLSPGK | |
| | First Half | EIVMTQSPATLSLSPGERATLSCRASQDISKYLN | 1331 |
| | Antibody | WYQQKPGQAPRLLIYHTSRLHSGIPARFSGSGS | |
| | Light Chain | GTDYTLTISSLQPEDFAVYFCQQGNTLPYTFGQ | |
| | | GTKLEIKRTVAAPSVFIFPPSDEQLKSGTASVVC | |
| | | LLNNFYPREAKVQWKVDNALQSGNSQESVTEQ | |
| | | DSKDSTYSLSSTLTLSKADYEKHKVYACEVTHQ | |
| | | GLSSPVTKSFNRGEC | |
| CD19_CTL119 | First Half | QVQLQESGPGLVKPSETLSLTCTVSGVSLPDYG | 1328 |
| _CD3_16nM- | Antibody | VSWIRQPPGKGLEWIGVIWGSETTYYQSSLKSR | |
| CD58_IgV | Heavy Chain | VTISKDNSKNQVSLKLSSVTAADTAVYYCAKHY | |
| V54C_G88C | (Fc | YYGGSYAMDYWGQGTLVTVSSASTKGPSVFPL | |
| Trispecific | sequence | APSSKSTSGGTAALGCLVKDYFPEPVTVSWNS | |
| | not shown) | GALTSGVHTFPAVLQSSGLYSLSSVVTVPSSSL | |
| | | GTQTYICNVNHKPSNTKVDKRVEPKSCGGGGS | |
| | | GGGGSEVQLVESGGGLVQPGGSLKLSCAASGF | |
| | | TFNTYAMNWVRQASGKGLEWVGRIRSKYNNYA | |
| | | TYYADSVKDRFTISRDDSKSTLYLQMNSLKTED | |
| | | TAVYYCVRHGNFGNSYVSWFAYWGQGTLVTVS | |
| | | SGGGGSGGGGSGGGGSGGGGSQAVVTQEPS | |
| | | LTVSPGGTVTLTCRSSTGAVTTSNYANWVQQK | |
| | | PGQAPRGLIGGTNKRAPWTPARFSGSLLGDKA | |
| | | ALTLSGAQPEDEAEYFCALWYSNLWVFGGGTK | |
| | | LTVLGGGGS | |
| | First Half | QVQLQESGPGLVKPSETLSLTCTVSGVSLPDYG | 1094 |
| | Antibody | VSWIRQPPGKGLEWIGVIWGSETTYYQSSLKSR | |
| | Heavy Chain | VTISKDNSKNQVSLKLSSVTAADTAVYYCAKHY | |
| | (includes Fc | YYGGSYAMDYWGQGTLVTVSSASTKGPSVFPL | |
| | sequence) | APSSKSTSGGTAALGCLVKDYFPEPVTVSWNS | |
| | | GALTSGVHTFPAVLQSSGLYSLSSVVTVPSSSL | |
| | | GTQTYICNVNHKPSNTKVDKRVEPKSCGGGGS | |
| | | GGGGSEVQLVESGGGLVQPGGSLKLSCAASGF | |
| | | TFNTYAMNWVRQASGKGLEWVGRIRSKYNNYA | |
| | | TYYADSVKDRFTISRDDSKSTLYLQMNSLKTED | |
| | | TAVYYCVRHGNFGNSYVSWFAYWGQGTLVTVS | |
| | | SGGGGSGGGGSGGGGSGGGGSQAVVTQEPS | |
| | | LTVSPGGTVTLTCRSSTGAVTTSNYANWVQQK | |
| | | PGQAPRGLIGGTNKRAPWTPARFSGSLLGDKA | |
| | | ALTLSGAQPEDEAEYFCALWYSNLWVFGGGTK | |
| | | LTVLGGGGSDKTHTCPPCPAPELLGGPSVFLFP | |
| | | PKPKDTLMISRTPEVTCVVVAVSHEDPEVKFNW | |
| | | YVDGVEVHNAKTKPREEQYGSTYRVVSVLTVLH | |
| | | QDWLNGKEYKCKVSNKALAAPIEKTISKAKGQP | |
| | | REPQVCTLPPSRDELTKNQVSLSCAVKGFYPSD | |
| | | IAVEWESNGQPENNYKTTPPVLDSDGSFFLVSK | |
| | | LTVDKSRWQQGNVFSCSVMHEALHNHYTQKSL | |
| | | SLSPGK | |
| | Second Half | SQQIYGVVYGNVTFHVPSNVPLKECLWKKQKD | 1334 |
| | Antibody | KVAELENSEFRAFSSFKNRVYLDTVSCSLTIYNL | |
| | (Fc | TSSDEDEYEMESPNITDTMKFFLYVLESGS | |
| | sequence | | |
| | not shown) | | |
| | Second Half | SQQIYGVVYGNVTFHVPSNVPLKECLWKKQKD | 1335 |
| | Antibody | KVAELENSEFRAFSSFKNRVYLDTVSCSLTIYNL | |
| | (includes Fc | TSSDEDEYEMESPNITDTMKFFLYVLESGSDKT | |
| | sequence) | HTCPPCPAPELLGGPSVFLFPPKPKDTLMISRTP | |
| | | EVTCVVVDVSHEDPEVKFNWYVDGVEVHNAKT | |
| | | KPREEQYASTYRVVSVLTVLHQDWLNGKEYKC | |
| | | KVSNKALPAPIEKTISKAKGQPREPQVYTLPPCR | |
| | | EEMTKNQVSLWCLVKGFYPSDIAVEWESNGQP | |
| | | ENNYKTTPPVLDSDGSFFLYSKLTVDKSRWQQ | |
| | | GNVFSCSVMHEALHNRYTQKSLSLSPGK | |
| | First Half | EIVMTQSPATLSLSPGERATLSCRASQDISKYLN | 1331 |
| | Antibody | WYQQKPGQAPRLLIYHTSRLHSGIPARFSGSGS | |
| | Light Chain | GTDYTLTISSLQPEDFAVYFCQQGNTLPYTFGQ | |
| | | GTKLEIKRTVAAPSVFIFPPSDEQLKSGTASVVC | |
| | | LLNNFYPREAKVQWKVDNALQSGNSQESVTEQ | |
| | | DSKDSTYSLSSTLTLSKADYEKHKVYACEVTHQ | |
| | | GLSSPVTKSFNRGEC | |
| CD19_CTL119 | First Half | QVQLQESGPGLVKPSETLSLTCTVSGVSLPDYG | 1328 |
| _CD3_16nM- | Antibody | VSWIRQPPGKGLEWIGVIWGSETTYYQSSLKSR | |
| CD58_IgV | Heavy Chain | VTISKDNSKNQVSLKLSSVTAADTAVYYCAKHY | |
| V45C_M114C | (Fc | YYGGSYAMDYWGQGTLVTVSSASTKGPSVFPL | |
| Trispecific | sequence | APSSKSTSGGTAALGCLVKDYFPEPVTVSWNS | |
| | not shown) | GALTSGVHTFPAVLQSSGLYSLSSVVTVPSSSL | |
| | | GTQTYICNVNHKPSNTKVDKRVEPKSCGGGGS | |
| | | GGGGSEVQLVESGGGLVQPGGSLKLSCAASGF | |
| | | TFNTYAMNWVRQASGKGLEWVGRIRSKYNNYA | |
| | | TYYADSVKDRFTISRDDSKSTLYLQMNSLKTED | |
| | | TAVYYCVRHGNFGNSYVSWFAYWGQGTLVTVS | |
| | | SGGGGSGGGGSGGGGSGGGGSQAVVTQEPS | |
| | | LTVSPGGTVTLTCRSSTGAVTTSNYANWVQQK | |
| | | PGQAPRGLIGGTNKRAPWTPARFSGSLLGDKA | |
| | | ALTLSGAQPEDEAEYFCALWYSNLWVFGGGTK | |
| | | LTVLGGGGS | |
| | First Half | QVQLQESGPGLVKPSETLSLTCTVSGVSLPDYG | 1094 |
| | Antibody | VSWIRQPPGKGLEWIGVIWGSETTYYQSSLKSR | |
| | Heavy Chain | VTISKDNSKNQVSLKLSSVTAADTAVYYCAKHY | |
| | (includes Fc | YYGGSYAMDYWGQGTLVTVSSASTKGPSVFPL | |
| | sequence) | APSSKSTSGGTAALGCLVKDYFPEPVTVSWNS | |
| | | GALTSGVHTFPAVLQSSGLYSLSSVVTVPSSSL | |
| | | GTQTYICNVNHKPSNTKVDKRVEPKSCGGGGS | |
| | | GGGGSEVQLVESGGGLVQPGGSLKLSCAASGF | |
| | | TFNTYAMNWVRQASGKGLEWVGRIRSKYNNYA | |
| | | TYYADSVKDRFTISRDDSKSTLYLQMNSLKTED | |
| | | TAVYYCVRHGNFGNSYVSWFAYWGQGTLVTVS | |
| | | SGGGGSGGGGSGGGGSGGGGSQAVVTQEPS | |
| | | LTVSPGGTVTLTCRSSTGAVTTSNYANWVQQK | |
| | | PGQAPRGLIGGTNKRAPWTPARFSGSLLGDKA | |
| | | ALTLSGAQPEDEAEYFCALWYSNLWVFGGGTK | |
| | | LTVLGGGGSDKTHTCPPCPAPELLGGPSVFLFP | |
| | | PKPKDTLMISRTPEVTCVVVAVSHEDPEVKFNW | |
| | | YVDGVEVHNAKTKPREEQYGSTYRVVSVLTVLH | |
| | | QDWLNGKEYKCKVSNKALAAPIEKTISKAKGQP | |
| | | REPQVCTLPPSRDELTKNQVSLSCAVKGFYPSD | |
| | | IAVEWESNGQPENNYKTTPPVLDSDGSFFLVSK | |
| | | LTVDKSRWQQGNVFSCSVMHEALHNHYTQKSL | |
| | | SLSPGK | |
| | Second Half | SQQIYGVVYGNVTFHCPSNVPLKEVLWKKQKD | 1336 |
| | Antibody | KVAELENSEFRAFSSFKNRVYLDTVSGSLTIYNL | |
| | (Fc | TSSDEDEYEMESPNITDTCKFFLYVLESGS | |
| | sequence | | |
| | not shown) | | |
| | Second Half | SQQIYGVVYGNVTFHCPSNVPLKEVLWKKQKD | 1337 |
| | Antibody | KVAELENSEFRAFSSFKNRVYLDTVSGSLTIYNL | |
| | (includes Fc | TSSDEDEYEMESPNITDTCKFFLYVLESGSDKT | |
| | sequence) | HTCPPCPAPELLGGPSVFLFPPKPKDTLMISRTP | |
| | | EVTCVVVDVSHEDPEVKFNWYVDGVEVHNAKT | |
| | | KPREEQYASTYRVVSVLTVLHQDWLNGKEYKC | |
| | | KVSNKALPAPIEKTISKAKGQPREPQVYTLPPCR | |
| | | EEMTKNQVSLWCLVKGFYPSDIAVEWESNGQP | |
| | | ENNYKTTPPVLDSDGSFFLYSKLTVDKSRWQQ | |
| | | GNVFSCSVMHEALHNRYTQKSLSLSPGK | |
| | First Half | EIVMTQSPATLSLSPGERATLSCRASQDISKYLN | 1331 |
| | Antibody | WYQQKPGQAPRLLIYHTSRLHSGIPARFSGSGS | |
| | Light Chain | GTDYTLTISSLQPEDFAVYFCQQGNTLPYTFGQ | |
| | | GTKLEIKRTVAAPSVFIFPPSDEQLKSGTASVVC | |
| | | LLNNFYPREAKVQWKVDNALQSGNSQESVTEQ | |
| | | DSKDSTYSLSSTLTLSKADYEKHKVYACEVTHQ | |
| | | GLSSPVTKSFNRGEC | |

[0793] Trispecific binding molecules were expressed transiently by co-transfection of the respective chains in HEK293 cells.

[0794] Briefly, transfection was performed using PEI as transfection reagent. For small scale (<5L) transfections, cells were grown in shake flasks on an orbital shaker (115 rpm) in a humidified incubator (85%) at 5% C02). Plasmids were combined with PEI at a final ratio of 1 DNA:3 PEI. 1 mg/L culture of plasmid was used for transfection at 2.0 million cells/mL serum media. After 5 days of expression, the TBMs were harvested by clarification of the media via centrifugation and filtration. Purification was performed via anti-CH1 affinity batch binding (CaptureSelect IgG-CH1 Affinity Matrix, Thermo-Fisher Scientific, Waltham, MA, USA) or Protein A (rProteinA Sepharose, Fast flow, GE Healthcare, Uppsala, Sweden) batch binding using 1 ml resin/100 mL supernatant. The protein was allowed to bind for a minimum of 2 hours with gentle mixing, and the supernatant loaded onto a gravity filtration column. The resin was washed with 20-50 CV of PBS. TBMs were eluted with 20 CV of 50 mM citrate, 90 mM NaCl pH 3.2. 50 mM sucrose The eluted TBMs were adjusted to pH 5.5 with 1 M sodium citrate 50 mM sucrose. Preparative size exclusion chromatography was performed using Hi Load 16/60 Superdex 200 grade column (GE Healthcare Life Sciences, Uppsala, Sweden) as a final polishing step when aggregates were presente. To confirm that the identity of the proteins of the TBMs expressed matched the predicted masses for the primary amino acid sequences, proteins were analyzed by high-performance liquid chromatography coupled to mass spectrometry.

### 8.13.2. Results

[0795] As shown in Table 25 below, inclusion of stabilizing disulfide variants had no adverse impact on overall expression yields of increased aggregate content upon purification.

TABLE 25

| | Expression | |
|---|---|---|
| | (mg/L) | % HMWS |
| CD19_CTL119_CD3_16nM-CD58_Full | 20 | <10% |
| ECD Trispecific | | |
| (Full ECD WT) | | |
| CD19_CTL119_CD3_16nM-CD58_IgV | 20 | ~10 |
| Trispecific | | |
| (IgV WT) | | |
| CD19_CTL119_CD3_16nM- | 55 | ~10 |
| CD58_IgV_V45C_M105C Trispecific | | |
| (IgV V45C_M105C) | | |
| CD19_CTL119_CD3_16nM-CD58_IgV | 65 | ~10 |
| V54C_G88C Trispecific | | |
| (IgV V54C_G88C) | | |
| CD19_CTL119_CD3_16nM-CD58_IgV | 63 | ~10 |
| V45C_M114C Trispecific | | |
| (IgV V45C_M114C) | | |

### 8.14. Example 14: Re-Directed T Cell Cytotoxicity with TBMs Containing CD58 Variants

[0796] TBMs of Example 13 containing the variant CD58 domains were analyzed for their potential to induce T cell-mediated apoptosis in tumor target cells.

### 8.14.1. Materials and Methods

[0797] Briefly, huCD19-expressing Nalm6 target cells were engineered to overexpress firefly luciferase. Cells were harvested and resuspendend in RPMI medium (Invitrogen #11875-093) with 10% FBS. 10,000 target cells per well were plated in a flat-bottom 96-well plate. Human pan T effector cells were isolated via MACS negative selection (Miltenyi Biotec #130-096-535) from two donors from cryopreserved PBMC (Cellular Technologies Limited #CTL-UP1) then added to the plate to obtain a final E:T ratio of 5:1. Co-cultured cells were incubated with a serial dilution of all constructs and controls. For normalization, average maximum luminescence refers to target cells co-incubated with effector cells, but without any test construct. After an incubation of either 24 or 48 hr at 37° C., 5% C02, OneGlo luciferase substrate (Promega #E6120) was added to the plate. Luminescence was measured on an Envision plate reader after a 10 minute incubation. Percent specific lysis was calculated using the following equation: Specific lysis (%)=(1−(sample luminescence/average maximum luminescence))*100

### 8.14.2. Results

[0798] As shown in FIG. 15, the TBMs containing the variant CD58 domains show comparable cytotoxic activity to a TBM with wild type CD58.

### 8.15. Example 15: T-Cell Activation with TBMs Containing CD58 Variants

[0799] As an alternative to primary T cell activation, a Jurkat-NFAT reporter cell line was used to evaluate the functional activity of the TBMs of Example 13 containing the variant CD58 domains.

### 8.15.1. Materials and Methods

[0800] The Jurkat T cell line (E6-1) was transfected with a NFAT-luciferase reporter construct and a stable, clonal cell line Jurkat cells with NFAT-LUC reporter (JNL), was selected for further characterization based on strong induction of the NFAT reporter following PMA and ionomycin stimulation.

[0801] The Jurkat reporter cell line for was used for determination of non-specific activation of NFAT.

[0802] Purified TBMs were tested for their potential to induce NFAT activation in the absence of target cells.

[0803] Jurkat cells with NFAT-LUC reporter (JNL) were grown in RPMI-1640 media containing 2 mM glutamine and 10% fetal bovine serum with puromycin at 0.5 ug/ml. 100,000 JNL cells per well were plated in a flat-bottom 96-well plate and were incubated with serial dilutions of the TBMs and controls. After an incubation of 6 hr at 37° C., 5% C02, OneGlo luciferase substrate (Promega #E6120) was added to the plate. Luminescence was measured on an Envision plate reader after a 10 minute incubation.

### 8.15.2. Results

[0804] As shown in FIG. 16, the TBMs containing the variant CD58 domains show tumor-independent (i.e., non-target cell specific) activitation levels comparable to or lower than TBMs containing wild type CD58.

### 8.16. Example 16: CD19 and CD58 Expression on Various Cell Lines

### 8.16.1. Materials and Methods

[0805] Cell surface expression of CD19 and CD58 was determined on OCI-LY-19 (a human B-cell non-Hodgkin lymphoma cell line), Karpas-422 (a human B-cell non-Hodgkin lymphoma cell line), Toledo (a human B-cell non-Hodgkin lymphoma cell ine), and Nalm-6 (B cell precursor leukemia cell line) cell lines by flow cytometry using APC labelled anti-CD19 (Biolegend, Cat #302212) and APC-labelled anti-CD58 (Biolegend, Cat #330918) and respective isotype control antibodies. The samples were run on BD LSR Fortessa and analyzed using FlowJo.

### 8.16.2. Results

[0806] The cell lines have different level of CD19 and CD58 expression (FIGS. 17A-H). The ranking for CD19 expression among the cell lines was OCI-LY-19>Karpas 422>Toledo=Nalm-6. The ranking for CD58 expression was OCI-LY-19>Nalm-6>Karpas=Toledo.

### 8.17. Example 17: RTCC and Cytokine Secretion Activity of the NEG258-Based TBMs Vs. A One-Arm BBM that does not Bind to CD2 and a TBM that does not Bind to CD19

[0807] CD3hi TSP1, CD3med TSP1, CD3 hi BSP1, and CD3hi TSP1C (H variants) were compared for their potential to induce T cell-mediated apoptosis in Karpas422 target cells.

### 8.17.1. Materials and Methods

[0808] An RTCC assay with huCD19-expressing Karpas422 target cells was performed according to the Materials and Methods described in Example 9, but with a final E:T ratio of 1:1 and a 96 hour incubation.

### 8.17.2. Results

[0809] As shown in FIGS. 18A-18B, CD3hi TSP1, CD3med TSP1, and CD3hi BSP1 show cytotoxic activity against Karpas422 target cells, with CD3hi TSP1 having the highest cytotoxic activity.

### 8.18. Example 18: Cytokine Release Assay

[0810] CD3hi TSP1, CD3med TSP1, CD3 hi BSP1, and CD3hi TSP1C (H variants) were analyzed for their ability to induce T cell-mediated de novo secretion of cytokines in the presence of Karpas422 cells.

### 8.18.1. Materials and Methods

[0811] A cytokine release assay was performed as in Example 10, but with Karpas422 cells at a final E:T ratio of 1:1 and an incubation of 48 hours.

### 8.18.2. Results

[0812] As shown in FIGS. 19A-19F, CD3hi TSP1, CD3med TSP1, and CD3hi BSP1 induced cytokine secretion by T cells, with CD3hi TSP1 inducing the highest levels of cytokine secretion, followed by CD3med TSP1, which was similar to CD3hi BSP1.

### 8.19. Example 19: TBM and BBM Binding to T Cells

[0813] Binding of CD3hi TSP1, CD3med TSP1, CD3hi BSP1, and CD3hi TSP1C (H variants) to T cells was evaluated using flow cytometry.

### 8.19.1. Materials and Methods

[0814] Peripheral blood mononuclear cells (PBMCs) previously isolated and cryopreserved from 2 Leukopak donors (Hemacare) were thawed and Pan T cells were isolated by negative selection using the Pan T cell Isolation Kit, human (Miltenyi Biotec, Cat #130-096-535) following the manufacturer's protocol. T cells were resuspended in FACS Buffer and 100,000 cells were added to each well of a 96 well round bottom plate. A dilution series of CD3med TSP1, CD3hi TSP1, CD3hi BSP1, and CD3hi TSP1C ranging from 33 μg/ml-0.005 μg/ml was added to cells and incubated on ice for 1 hour. Cells were washed twice, resuspended in 100 μl of anti-human IgG secondary antibody and incubated on ice for another hour. After the incubation, cells were washed twice, resuspended in 100 μl of fixable viability dye and incubated on ice for 30 min. After washing twice again, cells were resuspended in 120 μl of FACS buffer. The cells were then run on BD LSR Fortessa and data was analyzed using FlowJo to determine the MFI of anti-human IgG secondary antibody, which was plotted against antibody concentration.

### 8.19.2. Results

[0815] All antibodies showed different degree of binding to T cells (FIG. 20). CD3hi TSP1 was the strongest binder followed by CD3med TSP1, with BSP1 being the weakest binder. Without being bound by theory, it is believed that the improved binding of the TBMs can be attributed to co-engagement of CD2 and CD3 arms, thereby increasing the binding avidity to T cells.

### 8.20. Example 20: TBM and BBM Mediated T Cell Proliferation

[0816] CD3hi TSP1, CD3med TSP1, CD3hi BSP1, and CD3hi TSP1C (H variants), and blinatumomab were evaluated for their ability to induce T cells proliferation upon co-culture with CD19 expressing OCI-LY-19, Karpas422, and Toledo target cells.

### 8.20.1. Materials and Methods

[0817] Briefly, OCI-LY-19, Karpas422, and Toledo target cells stably expressing firefly luciferase were plated in a 96 well plate in T Cell Media (TCM) (RPMI-1640, ThermoFisher Scientific, Cat #11875-085), 10% FBS (Seradigm, Cat #1500-500), 1% L-Glutamine (Thermo Fisher Scientific, Cat #25830-081), 1% Non Essential Amino Acids (Thermo Fisher Scientific, Cat #11140-050), 1% Pen/Strep (Thermo Fisher Scientific, Cat #15070063), 1% HEPES (Thermo Fisher Scientific, Cat #15630080), Sodium Pyruvate (Thermo Fisher Scientific, Cat #11360-070), 0.1% Beta-mercaptoethanol (Thermo Fisher Scientific, Cat #21985-023)]. PBMCs previously isolated and cryopreserved from 2 Leukopak donors were thawed and Pan T cells were isolated (as described earlier). Isolated T cells were labelled with 5 μM Cell Trace Violet (CTV) (Thermo Fisher Scientific, Cat #C34557) following the manufacturer's protocol and were co-cultured with target cells at an E:T ratio of 1:3. A dilution series of CD3med TSP1, CD3hi TSP1, CD3hi BSP1, CD3hi TSP1C, and blinatumomab ranging from 2.5 nM-0.0006 nM was added to cells and the plates were incubated in a 5% C02, 37° C. incubator for 96 hrs. After incubation, the cells were harvested, treated with Human TruStain FcX (Fc Block) (Biolegend, Cat #422302) and stained with Fixable Viability Dye eFlour 780 (ThermoFisher Scientific, Cat #65-0865-14), followed by staining with PerCP-Cy5.5 conjugated anti-human CD3 mAb (Biolegend, Cat #317336). All staining steps were performed according to manufacturer's protocol. Flow analysis were performed using BD LSR Fortessa and FlowJo software to determine % proliferated CD3+ T cells based on CD3 staining and dilution of Cell Trace Violet dye.

### 8.20.2. Results

[0818] All CD19 targeting antibodies induced proliferation of T cells upon co-culture with different CD19 expressing target cell lines (FIGS. 21A-21C). The T cell proliferation effect was dose-dependent, and CD3hi TSP1 showed more potent activity than CD3med TSP1 and CD3hi BSP1. The control antibody did not induce any T cell proliferation indicating that CD19 target-specific engagement was required for the proliferation of T cells. Blinatumomab mediated the most potent T cell proliferation in the presence of OCI-LY-19 and Toledo cells. In the presence of Karpas420, CD3hi TSP1 more effectively induced T cell proliferation as shown by the maximum percentage of proliferated T cells.

### 8.21. Example 21: RTCC Activity of NEG258-Based TBMs with Different CD3 Affinities Vs. A BBM and Blinatumomab

[0819] The NEG258-based TBMs containing CD3 binding arms with different affinities (CD3hi TSP1 and CD3med TSP1 (H variants)) and a BBM (CD3hi BSP1 (H variant)) were compared for their potential to induce T cell-mediated apoptosis in Karpas422 target cells. The study also included blinatumomab as a control.

### 8.21.1. Materials and Methods

[0820] An RTCC assay with huCD19-expressing Karpas422 target cells was performed according to the Materials and Methods described in Example 9, but with a final E:T ratio of 1:1 and a 96 hour incubation.

### 8.21.2. Results

[0821] As shown in FIGS. 22A-22B, both types of TBMs show cytotoxic activity against Karpas422 cells. The TBMs demonstrated superior cytotoxic activity compared to the BBM. CD3hi TSP1 showed similar or superior cytotoxic activity compared to blinatumomab.

### 8.22. Example 22: RTCC Activity of NEG258-Based TBMs with Different CD3 Affinities Vs. A BBM and TBMs that do not Bind to CD19 Against Multiple B Cell Lymphoma Cell Lines

[0822] CD3hi TSP1, CD3med TSP1, CD3hi BSP1, and CD3hi TSP1C (H variants) were compared for their potential to induce T cell-mediated apoptosis in Oci-Ly19, Toledo, Nalm6, Nalm6 KO and K562 target cells. Oci-Ly19, Toledo, Nalm6 cells express hCD19 antigen. Nalm6 KO and K562 target cells lacking hCD19 expression were used to assess target-independent killing. The study also included blinatumomab as a control.

### 8.22.1. Materials and Methods

[0823] Nalm6 KO was generated from Nalm6 parental cell line by using CRISPR-CAS9 technology and was confirmed to lack hCD19 expression. Oci-Ly19, Toledo, Nalm6, Nalm6 KO and K562 target cells were engineered to overexpress firefly luciferase. RTCC assays were performed with the different cells lines according to the Materials and Methods described in Example 9, but with a final E:T ratio of 1:1 and a 48 hour incubation.

### 8.22.2. Results

[0824] CD3hi TSP1 and CD3med TSP1 showed cytotoxic activity against Oci-Ly19, Toledo and Nalm6, but showed minimal activity against antigen-negative Nalm6 KO and K562 (FIGS. 23A-23J). The TBMs demonstrated superior cytotoxic activity compared to the BBM. CD3hi TSP1 showed comparable cytotoxic activity to blinatumomab.

### 8.23. Example 23: Cytokine Release Assay of the NEG258-Based TBMs with Different CD3 Affinities Vs. A BBM and TBMs that do not Bind to CD19 Against Multiple B Cell Lymphoma Cell Lines

[0825] CD3hi TSP1, CD3med TSP1, CD3hi BSP1 and CD3hi TSP1C (H variants) were compared for their potential to induce T cell-mediated de novo secretion of cytokines in Oci-Ly19, Toledo, Nalm6, Nalm6 KO and K562 target cells. Oci-Ly19, Toledo, Nalm6 cells express hCD19 antigen. Nalm6 KO and K562 target cells that lack hCD19 expression were used to assess target-independent cytokine release. The study also included blinatumomab as a control.

### 8.23.1. Materials and Methods

[0826] Target cells were harvested and resuspended in RPMI medium (Invitrogen #11875-093) with 10% FBS. 5,000 target cells per well were plated in a flat-bottom 384-well plate. Human pan T effector cells were isolated via negative selection (Stemcell Technologies #17951) from two donors from cryopreserved PBMCs that were separated from a leukopak (Hemacare #PB001F-1) by Ficoll density gradient centrifugation. Purified T cells were then added to the plate to obtain a final E:T ratio of 1:1. After an incubation of 48 hr at 37° C., 5% C02, the supernatants were harvested for subsequent analysis. A multiplexed ELISA was performed according to the manufacturer's instructions using a human cytokine custom 3-plex 384 4-spot kit (MesoScale Discovery #N31IB-1).

### 8.23.2. Results

[0827] As shown in FIGS. 24A-24J, both NEG258-based TBMs induce significant cytokine secretion by T cells in a dose-dependent manner when incubated with Oci-Ly19, Toledo and Nalm6 cells. Minimal cytokine secretion was detected when incubating with antigen-negative Nalm6 KO and K562.

### 8.24. Example 24: Re-Challenge RTCC Assay with Karpas 422 & OCI-LY-19 Cell Lines

[0828] The effect of target cell re-challenge on the killing activity of CD3hi TSP1 (H variant), CD3med TSP1 (H variant), CD3hi BSP1 (H variant), and blinatumomab treated T cells was determined using a dose titration re-challenge RTCC assay.

### 8.24.1. Materials and Methods

[0829] OCI-LY-19 and Karpas422 target cells stably expressing firefly luciferase were plated in a Costar 6 well plate in T Cell Media (TCM). PBMCs previously isolated and cryopreserved from 2 Leukopak donors were thawed and Pan T cells were isolated (as described earlier). A co-culture of T cells and OCI-LY-19 or Karpas 422 cells at E:T ratio of 1:1 along with EC90 concentration (0.1 nM for OCI-LY-19 and 0.5 nM for Karpas 422) of CD3med TSP1, CD3hi TSP1, CD3hi BSP1, and blinatumomab was set-up. The plates were incubated for 4 days for OCI-LY-19 and 5 days for Karpas 422 cells. At the end of incubation, the killing of target cells was determined using the luminescence signal. The absolute T cell counts from each antibody treated condition was also determined. For the next round of rechallenge, it was ensured that the killing of target cells was equivalent across various antibody conditions. The T cell counts were normalized across different antibody conditions and another round of a single concentration rechallenge was set-up at E:T of 1:1 using the EC90 concentration with a 4 day incubation for both target cells. Additionally, a dose titration RTCC at a E:T of 1:1 and a concentration range of 2 nM −0.000001 nM was set-up using T cells from the different antibody treated conditions with a 4 day incubation used for each cell line. The killing of target cells was determined using the luminescence signal to generate dose response curves. At the end of the challenge, the above process was repeated once more for Karpas 422 and twice more for OCI-LY-19 cells. The assay set-up is shown in FIG. 25A.

### 8.24.2. Results

[0830] As can be seen from FIGS. 25B-25H, CD3hi TSP1 was able to better retain killing ability upon repeated challenges with the target cells compared to CD3med TSP1, and CD3hi TSP1. CD3med TSP1 was the next best, with CD3hi BSP1 being the least active of all antibodies. CD3hi TSP1 demonstrated similar activity when compared to Blinatumomab in the first 2 or 3 rounds of re-challenges for Karpas422 and OCI-LY-19 cells, respectively. At the last re-challenge for OCI-LY-19, CD3hi TSP1 mediated more potent RTCC than blinatumomab (both in EC50 and maximum lysis), whereas for Karpas422, blinatumomab mediated higher maximum lysis than CD3hi TSP1 despite a similar EC50.

### 8.25. Example 25: Re-Challenge T Cell Phenotyping with Karpas 422 & OCI-LY-19 Cell Lines

[0831] The effect of target cell re-challenge on the phenotype of CD3hi TSP1, CD3med TSP1, and CD3hi BSP1 (H variants) treated T cells was determined using a single concentration re-challenge assay.

### 8.25.1. Materials and Methods

[0832] OCI-LY-19 and Karpas422 target cells stably expressing firefly luciferase were plated in a Costar 6 well plate in T Cell Media (TCM). PBMCs previously isolated and cryopreserved from 2 Leukopak donors were thawed and Pan T cells were isolated (as described earlier). Co-cultures of T cells and OCI-LY-19 or Karpas 422 cells at E:T ratio of 1:1 was set-up and 1 nM of CD3hi BSP1, CD3med TSP1, or CD3hi TSP1 was added. The plates were incubated for 4 days for OC-LY-19 and 5 days for Karpas 422 cells. At the end of incubation, the killing of target cells and absolute T cell counts from each antibody treated condition was determined. The T cell counts were normalized across different antibody conditions and two additional rounds of re-challenges were set-up the same way as the previous challenge with a 4 day incubation for both target cells, for a total of three challenges. After the third challenge, T cells from different antibody treated conditions were harvested on day 2 from the Karpas 422 co-cultures and on day 4 from OCI-LY-19 co-cultures and split into 2 fractions. One fraction was stained with blue fixable viability dye (ThermoFisher Scientific, Cat #L23105) prior to staining with a cocktail of anti-human CD3 (Biolegend, Cat #317324), CD4 (Biolegend, Cat #344608), CD8 (BD Biosciences, Cat #563795), CD27 (Biolegend, Cat #356412) & CD62L mAb (Biolegend, Cat #304814). The second fraction was resuspended to 1e6/ml in TCM and stimulated with Cell Stimulation Cocktail (Tonbo Biosciences, Cat #TNB4975) for 4 hrs at 37° C. Thereafter the cells were washed and sequentially stained with blue fixable viability dye (ThermoFisher Scientific, Cat #L23105), a cocktail of anti-human CD3 (Biolegend, Cat #317324), CD4 (Biolegend, Cat #344608), CD8 (BD Biosciences, Cat #563795), followed by permeabilization using the FoxP3 transcription factor staining set (ThermoFisher Scientific, Cat #00-5523-00) and final staining with anti-human IFNγ mAb (Biolegend, Cat #400134) and IL-2 mAb (Biolegend, Cat #400551) or respective isotype controls. All stainings were performed according to manufacturer's protocol. Flow analyses were performed using BD LSR Fortessa and FlowJo software.

### 8.25.2. Results

[0833] As shown in FIGS. 26A-26H (Karpas 422 model) and FIGS. 26I-26P (OCI-LY-19 model), CD3hi TSP1 better promoted enrichment of younger phenotype of T cells than CD3med TSP1 and CD3hi BSP1. CD3hi TSP1 was also able to induce better cytokine production from the T cells compared to the other CD19 binders tested.

### 8.26. Example 26: Ability of CD3hi TSP1 vs. CD3hi BSP1 to Elicit T Cell Proliferation and Cytokine Production in Presence of CD19+ Target Cells

[0834] CD3hi TSP1 and CD3hi BSP1 (R variants) were evaluated for their ability to induce T cell proliferation, cytokine production and changes in T cells' surface markers expression, upon co-culture with CD19-expressing Nalm6 target cells.

### 8.26.1. Materials and Methods

[0835] Nalm-6 target cells stably expressing firefly luciferase were irradiated at 50Gy on the day of the assay set up. Peripheral blood mononuclear cells (PBMCs) previously isolated from buffy coat donors (Bern Hospital) and cryopreserved were thawed and total T cells were isolated by negative selection using the human Pan T cell Isolation Kit (Miltenyi Biotec, Cat #130-096-535) following the manufacturer's protocol. The positive fraction (called PBMCs-T cells depleted) was irradiated at 50Gy in order to be used as feeder for the co-culture. From the negative fraction, enriched in total T cells, CD8⁺ T cells were isolated by an additional step of negative selection using EasySep™ Human CD8+ T Cell Enrichment Kit (Stem Cell, Cat #19053). Untouched CD8⁺ cells were then stained with an anti-CD28 antibody (Biolegend, Cat #302922) and sorted with a FACSAria (BD) according to CD28 expression: CD8⁺CD28⁺ and CD8⁺CD28⁻. The purity of sorted cells was >95%.

[0836] After sorting, T cells were labelled with 2.5 μM of Carboxyfluorescein succinimidyl ester (CFSE, Thermo Scientific, Cat #C34554) following the manufacturer's protocol.

[0837] Each T cell subset (either CD8⁺CD28⁺ or CD8⁺CD28⁻) of CFSE-labelled T cells was co-cultured with Nalm6 target cells, seeding 50,000 T cells and 50,000 target cells to achieve an effector:target (E:T) ratio of 1:1. Cells were diluted and co-plated to obtain additional final E:T ratio of 1:3 or 1:6.

[0838] In the co-culture conditions where the presence of irradiated PBMCs-T cells depleted was required, 10,000 PBMCs were plated to obtain a 5:1 ratio, effector T cells: PBMCs.

[0839] The T cells-tumor cells co-culture was plated in a Costar 96 well plate (Corning, Cat #3585) in T Cell Media [RPMI-1640 (ThermoFisher Scientific, Cat #21875-034); 10% FBS HyClone (GE healthcare, Cat #SH30070.03); 1% Non Essential Amino Acids (Thermo Fisher Scientific, Cat #11140-050); 1% Pen/Strep (Thermo Fisher Scientific, Cat #15140122); 1% HEPES (Lonza, Cat #17737E); Sodium Pyruvate (Thermo Fisher Scientific, Cat #11360-070); 50 μM Beta-mercaptoethanol (Thermo Fisher Scientific, Cat #31350)].

[0840] CD3hi TSP1 and CD3hi BSP1, diluted in T cell Media, were added to the cells at different concentrations (1 nM, 0.1 nM and 0.01 nM) and incubated in a 5% C02, 37° C. incubator for 72 hrs. In order to be able to detect intracellular cytokines production, plates were incubated for the last 1.5 hrs of the co-culture with PMA (50 ng/ml; SIGMA, Cat #P1585)). lonomycin (500 μg/ml; Calbiochem, Cat #407950); brefeldin (10 μg/ml; Cell Signaling, Cat #9972) was also added for the last 1.5 hours of the incubation.

[0841] At the end of the 72 hrs, cells were harvested and then stained with a viability die, Zombie Aqua (Biolegend, Cat #423102) by incubating at room temperature, for 10 mins. Cells were then washed twice using FACS Buffer and stained with antibodies against surface markers: anti-CD2 (Biolegend, Cat #300214), anti-CD28 (Biolegend, Cat #302922), anti-CCR7 (Biolegend, Cat #353226), and anti-CD45RO (Biolegend, Cat #304216). Intracellular IFN-g and granzyme B (GzB) were detected by treating T cells with BD cytofix cytoperm kit (BD, Cat #555028) according to the manufacturer's instructions, and staining them with anti-IFNg (Biolegend, Cat #502509) and anti-granzyme B antibodies (BD, Cat #560213). Samples were washed with FACS buffer and acquired on a BD LSR Fortessa (BD). Analysis was performed with FLOWJO software (version 10.6.0; Tree Star Inc.).

### 8.26.2. Results

[0842] Both CD3hi TSP1 and CD3hi BSP1 induced proliferation of both CD28⁺ and CD28⁻ T cells upon co-culture with CD19 expressing target cell line Nalm6 (FIGS. 27A-27D). However, CD3hi TSP1 was more potent in inducing proliferation of both T cells subsets compared to CD3hi BSP1. The effect was observed at both concentrations tested and at the different E:T ratios used. The effect on T cell proliferation was observed both in presence or absence of irradiated PBMCs.

[0843] In presence of 1 nM of CD3hi BSP1, no major differences were observed in terms of percentage of T cells producing IFN-g or granzyme B (GzB); however, in presence of CD3hi TSP1 there was a clear shift in the median fluorescence intensity (MFI) for both cytokines, indicating an increase in the expression of both IFNg and GzB, in particular among the CD28⁻ T cells when co-cultured in presence of irradiated PBMCs (FIGS. 28A-28D). The effect of CD3hi TSP1 on cytokines producing-T cells is even more pronounced at 0.1 nM: both in presence and absence of irradiated PBMCs there was a clear increase in GzB⁺ T cells and IFNg⁺ T cells both within CD28− and CD28+ T cell subsets, as MFI (FIGS. 28E-28H). Moreover, the proportion (%) of CD28⁻ T cells IFNg⁺ GzB⁺ was also more pronounced in presence of CD3hiTSP1 (FIGS. 28I-28L).

[0844] The combination of the expression profile of CD45RO and CCR7 define the distribution of the different T cell populations: naive (CD45RO⁻CCR7⁺), central memory (CM) (CD45RO⁺CCR7⁺), effector memory (EM) (CD45RO⁺CCR7⁻) and the terminally differentiated (TEMRA) (CD45RO⁻CCR7⁻). Changes in the T cell surface phenotype are shown in FIG. 29. There was no major effect of the CD3hi molecules on the CD28⁺ cells that maintain the homogenous distribution of the different T cells populations, observed right after sorting, also after 72 hrs of co-culture. Conversely, there was an effect of CD3hi TSP1 on CD28⁻ cells: while after sorting CD28⁻ cells showed almost entirely a TEMRA phenotype, after 72 hrs treatment with CD3hiTSP1 CD28− cells re-aquired a central memory/effector memory phenotype with a concomitant decrease in the proportion of cells with a more terminally differentiated (TEMRA) profile.

### 8.27. Example 27: Ability of CD3hiTSP1 vs. CD3hi BSP1 Molecules to Elicit Redirected T-Cell Cytotoxic Activity (RTCC) Against CD19+ Target Cells

[0845] An RTCC assay was set up with CD19+ Nalm6 cells, engineered to express the luciferase gene, and sorted CD8 T cells populations to measure the ability of CD3hi TSP1 and CD3hi BSP1 (R variants) to elicit cytotoxic activity of CD8 T cells subsets.

### 8.27.1. Materials and Methods

[0846] Peripheral blood mononuclear cells (PBMCs) previously isolated from buffy coat donors (Bern Hospital) and cryopreserved were thawed and total T cells were isolated by negative selection using the Pan T cell Isolation Kit, human (Miltenyi Biotec, Cat #130-096-535) following the manufacturer's protocol. The positive fraction (called PBMCs-T cell depleted) was irradiated at 50Gy in order to be used as feeder in the co-culture.

[0847] From the negative fraction, enriched in total T cells, CD8⁺ T cells were then isolated by an additional step of negative selection using EasySep™ Human CD8+ T Cell Enrichment Kit (Stem Cell, Cat #19053). Untouched CD8⁺ cells were then stained with an anti-CD28 antibody (Biolegend, Cat #302922) and sorted with a FACSAria (BD) according to the CD28 expression: CD8⁺CD28⁺ and CD8⁺CD28⁻. The purity of th sorted cells was >95%.

[0848] Each T cell subset (either CD8⁺CD28⁺ or CD8⁺CD28⁻) was then co-cultured in a 384-well flat-bottom microtiter plate (ThermoFisher Scientific, Cat #142761) with equivalent number of Nalm6 target cells to achieve an effector: target (E:T) ratio of 1:1 (3,000 T cells and 3,000 Target cells). The co-culture was set up in T Cell Media [RPMI-1640 (ThermoFisher Scientific, Cat #21875-034), 10% FBS HyClone (GE healthcare, Cat #SH30070.03), 1% Non Essential Amino Acids (Thermo Fisher Scientific, Cat #11140-050), 1% Pen/Strep (Thermo Fisher Scientific, Cat #15140122), 1% HEPES (Lonza, Cat #17737E), Sodium Pyruvate (Thermo Fisher Scientific, Cat #11360-070), 50 μM Beta-mercaptoethanol (Thermo Fisher Scientific, Cat #31350)]. Cells were diluted and co-plated to obtain additional final E:T ratio of 1:3 or 1:6. In the co-culture conditions where the presence of irradiated PBMCs-T cells depleted was required, 600 PBMCs were plated to obtain a 5:1 ratio, effector T cells: PBMCs.

[0849] CD3hi TSP1, CD3hi BSP1 and CD3hi TSP1C antibody control were added to the cells at different concentrations (1 nM, 0.1 nM and 0.01 nM).

[0850] Plates were incubated in a 37° C. incubator with 5% C02 for 72 hrs. Following the co-incubation, One-Glo (Promega, catalog #E6110) was added to all wells and the luminescence signal was subsequently measured on an ELISA Reader 4.18 1 (Biotek, Synergy H1). Target cells with One-Glo served as maximal signal. The percent RTCC of target cells was calculated using the following formula: [100−(sample/maximal signal)*100%].

### 8.27.2. Results

[0851] Results are shown in FIGS. 30A-30D. Both CD3hi TSP1 and CD3hi BSP1 mediated RTCC activity against CD19+ Nalm6-luc target cells when compared to the control antibody CD3hi TSP1C. When 0.1 nM or 1 nM of CD3hi TSP1 was used, an increase in the CD3hi TSP1-mediated RTCC was observed in the settings with CD8⁺CD28⁻ T cells (in presence of irradiated feeder) compared to the other treatments.

### 8.28. Example 28: Anti-Tumor Activity of CD3hi TSP1 and CD3med TSP1 in an Adoptive Transfer Adaptation of the OCI-LY-19 Diffuse Large B-Cell Lymphoma Tumor Model in NSG Mice

[0852] The anti-tumor activity of CD3hi TSP1 and CD3med TSP1 (H variants) were studied in an OCI-LY-19 diffuse large B-cell lymphoma (DLBCL) tumor model in NSG mice.

### 8.28.1. Materials and Methods

[0853] On Day 0, OCI-LY-19 cells were harvested and suspended in Hanks Balanced Salt Solution (HBSS) at a concentration of 500×10⁶ cells/mL. Female NOD.Cg-Prkdcscid Il2rgtm1Wjl/SzJ mice (NSG mice) at −6 weeks old (Jackson Laboratories, ME) were injected with 5×10⁶ OCI-LY-19 cells in 200 μL subcutaneously on the right flank. Seven days following tumor inoculation, each mouse received an adoptive transfer (AdT) of 15×10⁶ of peripheral blood mononuclear cells (PBMCs) in 100 μL via IV injection in the lateral tail vein. The PBMCs were previously isolated from a human leukopak, frozen and stored in Cryostor10 media in vapor phase liquid nitrogen tank until use. Immediately prior to AdT, PBMCs were thawed and suspended at a concentration of 100×10⁶cells/ml in Hanks Balanced Salt Solution (HBSS). When tumor burden (TB) reached an average of −200 mm³ volume measured via mechanical caliper, mice (n=8/group) were treated with a single IV administration of CD3hi TSP1 or CD3med TSP1 at dose levels 0.003 mg/kg, 0.01 mg/kg, 0.03 mg/kg, 0.1 mg/kg or 0.3 mg/kg. Anti-tumor activity of each antibody was compared to an untreated control group that received tumor implant and AdT but no treatment (tumor+AdT) (Table 26). The tumor only group was included to meter the allogeneic response observed with untreated control. All treatments were administered at 10 mL/kg according to individual mouse body weights. Anti-tumor activity was determined by percent change in tumor burden vs. change in untreated control (% ΔT/ΔC) or % regression.

[0854] Tumor burden and body weights were recorded twice weekly. Tumor burden was measured by bioluminescence signal intensity in p/s using a bioluminescence imaging system (IVIS200, Perkin Elmer). Anti-tumor activity was determined by % ΔT/ΔC using the formula: 100×ΔTB_{treatment, time}/ΔTB_{control group, time} if ΔTB≥0; or % regression: (−1×(100×(TB_{final}−TBᵢₙᵢₜᵢₐₗ/TBᵢₙᵢₜᵢₐₗ) if ΔTV<0. TBᵢₙᵢₜᵢₐₗ is the tumor burden on the day of treatment initiation. % ΔT/ΔC values<42% were considered to have anti-tumor activity. Percent body weight change was determined using the formula: 100×((BWₜᵢₘₑ−BWᵢₙᵢₜᵢₐₗ)/BWᵢₙᵢₜᵢₐₗ). Statistical analysis using One-way ANOVA with Dunnett's multiple comparison test was performed using Graphpad Prism Software, Version. 7.03.

[0855] On day 25 following OCI-LY-19 implantation, all animals from the untreated control group were euthanized due to tumor burden.

### 8.28.2. Results

[0856] This study had minimal allogeneic response (FIGS. 31A-31B).

[0857] Antibody treatment with CD3hi TSP1 at 0.1 mg/kg and 0.3 mg/kg resulted in significant tumor regressions of 72.41% and 84.50%, respectively. Antibody treatment with CD3hi TSP1 at 0.03 mg/kg resulted in tumor regression of 13.74%. Antibody treatment with CD3hi TSP1 at 0.003 mg/kg exhibited significant anti-tumor activity at 1.38% ΔT/ΔC. Antibody treatment with CD3hi TSP1 at 0.003 mg/kg dose level was not active in this model (Table 26; FIG. 31A).

[0858] There was no antibody associated body weight loss with CD3hi TSP1. The body weight change observed with the treatment of CD3hi TSP1 was most likely due to the onset of graft-versus host disease (GvHD). Body weight loss is an endpoint parameter for both disease burden and onset of GvHD. At 35-42 days post-PBMC injection (28-35 days post-tumor implant), animals began to exhibit weight loss attributed to GvHD. Animals with high tumor burden also demonstrated disease-burden associated weight loss. Over the course of the study, body weights increased relative the initial measurement taken on the day of tumor implant (Table 26, FIG. 32A). However at the end of study, the body weight loss observed relative to the peak gain is indicative of GvHD and disease-burden induced weight loss.

[0859] Antibody treatment with CD3med TSP1 resulted in significant anti-tumor responses at 0.1 mg/kg (5.60% regression) and 0.3 mg/kg (36.33% regression). Treatment with CD3med TSP1 resulted in significant anti-tumor responses with % ΔT/ΔC values of 7.39% for the 0.03 mg/kg dose level. Antibody treatment with CD3med TSP1 at 0.003 and 0.01 mg/kg was not active in this model (Table 27; FIG. 31B).

[0860] There was no antibody associated body weight loss with CD3med TSP1. Body weight loss due to the onset of GvHD was not observed for this construct by the end of the study (Table 27, FIG. 32B).

TABLE 26

| | | | | | | Host Response | |
|---|---|---|---|---|---|---|---|
| | | | Tumor Response | | | Δ Body | |
| | | | | | Δ Tumor burden | weight from | |
| | | | | | from post-dose | post-dose | |
| | | | | | (mm³) | (%) | Survival |
| Test | Dose | | ΔT/ΔC | Regression | (Mean) | (Mean ± SEM) | (survivors/ |
| agent | (mg/kg) | Schedule | (%) | (%) | Day 25 | Day 25 | total) |
| Tumor | N/A | — | 100 | — | 952.252 | | 5/5 |
| only | | | | | | | |
| Tumor + | N/A | — | 100 | — | 822.216 | | 8/8 |
| AdT | | | | | | | |
| CD3hi | 0.003 | Single | 24.20 | — | 198.9588 | 1.7 ± 1.6 | 8/8 |
| TSP1 | | dose/IV | | | | | |
| CD3hi | 0.01 | Single | 1.38 | — | 11.37875 | −0.7 ± 1.8 | 8/8 |
| TSP1 | | dose/IV | | | | | |
| CD3hi | 0.03 | Single | — | 13.74* | −29.7413 | 1.9 ± 2.0 | 8/8 |
| TSP1 | | dose/IV | | | | | |
| CD3hi | 0.1 | Single | — | 72.41* | −155.988 | 1.2 ± 2.3 | 8/8 |
| TSP1 | | dose/IV | | | | | |
| CD3hi | 0.3 | Single | — | 84.50* | −187.737 | −0.4 ± 1.0 | 7/7** |
| TSP1 | | dose/IV | | | | | |

*p < 0.05, Dunnett's multiple comparison test
**One animal was excluded from the study

TABLE 27

| | | | Tumor Response | | | Host Response | |
|---|---|---|---|---|---|---|---|
| | | | | | Δ Tumor burden | Δ Body | |
| | | | | | from initial | weight from | |
| | | | | | (mm³) | initial | Survival |
| Test | Dose | | ΔT/ΔC | Regression | (Mean) | (%) | (survivors/ |
| agent | (mg/kg) | Schedule | (%) | (%) | Day 25 | (Mean ± SEM) | total) |
| CD3med | 0.003 | Single | 45.36 | — | 372.94 | 4.2 ± 2.1 | 8/8 |
| TSP1 | | dose/IV | | | | | |
| CD3med | 0.01 | Single | 57.13 | — | 469.6988 | 5.7 ± 2.7 | 8/8 |
| TSP1 | | dose/IV | | | | | |
| CD3med | 0.03 | Single | 7.39 | — | 60.7375 | 2.6 ± 1.6 | 8/8 |
| TSP1 | | dose/IV | | | | | |
| CD3med | 0.1 | Single | — | 5.60* | −12.1488 | 3.3 ± 2.0 | 8/8 |
| TSP1 | | dose/IV | | | | | |
| CD3med | 0.3 | Single | — | 36.33* | −78.7388 | 3.54 ± 1.4 | 8/8 |
| TSP1 | | dose/IV | | | | | |

*p < 0.05, Dunnett's multiple comparison test

### 8.29. Example 29: Anti-Tumor Activity Following Multiple Doses of CD3 TSP1, CD3hi BSP1 and CD3med TSP1 in the OCI-LY-19 in the Adaptation of a DLBCL Subcutaneous Tumor Model in huCD34+ NSG Mice

[0861] The anti-tumor activity of CD3hi TSP1, CD3hi BSP1, and CD3med TSP1 (H variants) were studied in an OCI-LY-19 DLBCL subcutaneous tumor model in huCD34+ NSG mice.

### 8.29.1. Materials and Methods

[0862] The process of humanization of NGS mice used in this study is shown schematically in in FIG. 33. Briefly, female female NSG mice at ˜6 weeks old (Jackson Laboratories, ME) underwent a preconditioning protocol to depopulate the bone marrow niche. This was accomplished by either chemical ablation or by X-ray irradiation to allow for reconstitution of a human immune system in each NSG mouse. Within twenty-four hours following preconditioning, 50,000 huCD34+ stem cells (huCD34+SC) isolated from single umbilical cords (Lonza, StemCell) were introduced in 100 μL via IV injection in the lateral tail vein. Each mouse received huCD34+SC from a single donor. The huCD34+SC were received frozen and stored in a −200° C. liquid nitrogen tank until use. Immediately prior to inoculation, huCD34+SC vials were removed from the liquid nitrogen tank, thawed in a bead-bath at 37° C. and re-suspended in PBS at a final concentration of 500,000 cells/mL. For sixteen weeks post humanization, mice were monitored weekly for body weights and body condition. At week 16, mice were bled via the tail and human immune reconstitution (human engraftment) was ascertained by fluorescent activated cell sorting (FACS). Mice with ≥25% hCD45/total CD45 were considered stably engrafted and were eligible for study enrollment.

[0863] Following engraftment assessment, mice were implanted with tumor cells subcutaneously. On Day 0, OCI-LY-19 cells were harvested and suspended in Hanks Balanced Salt Solution (HBSS) at a concentration of 10×10⁷ cells/mL and then diluted 1:1 with matrigel to give a final concentration of 5×10⁷ cells/mL. Mice were implanted via subcutaneous (SQ) injection on the right flank with 5×10⁶ cells/mouse in 100 μL volume. Fifteen days post implant (mean tumor volume ˜250-300 mm³ measured via calipers), mice were randomized on two parameters: donor and tumor volume. This ensured equal distribution of donors and comparable tumor volumes in each group. There were 3 treatment groups, n=8, and untreated control, n=5. Mice were treated weekly for 2-4 weeks via IV administration with CD3hi TSP1 (0.3 mg/kg), CD3med TSP1 (1.0 mg/kg), or CD3hi BSP1 (0.3 mg/kg). Anti-tumor activity of each antibody was compared to an untreated huCD34+SC control group that received tumor implant (tumor+CD34+) (Table 28). All treatments were administered at 10 mL/kg according to individual mouse body weights. Anti-tumor activity was determined by percent change in tumor volume of treated vs. untreated control (% ΔT/ΔC) or % regression and durability of response was evaluated by monitoring % surviving animals over time. Animals whose TV, BW or BCS (body condition score) that reached end point criteria by exceeding limits provisioned in the lab's animal use protocol (AUP) were euthanized.

[0864] Tumor burden (TV) and body weights were recorded twice weekly. Tumor burden was measured by calipers, capturing length and width, and the tumor volume was calculated using the formula (w²×L)/3.14. Body weight was measured by scale. Both parameters were entered into an in-house system (INDIGO). Anti-tumor activity was determined by % ΔT/ΔC using the formula: 100×ΔTB_{treatment, time}/ΔTB_{control group, time} if ΔTB≥0; or % regression: (−1×(100×(TB_{final}−TBᵢₙᵢₜᵢₐₗ/TBᵢₙᵢₜᵢₐₗ) if ΔTV<0. TBᵢₙᵢₜᵢₐₗ is the tumor burden on the day of treatment initiation. % ΔT/ΔC values<42% were considered to have anti-tumor activity. Percent body weight change was determined using the formula: 100×((BWₜᵢₘₑ−BWᵢₙᵢₜᵢₐₗ)/BWᵢₙᵢₜᵢₐₗ). Statistical analysis using One-way ANOVA with Dunnett's multiple comparison test was performed using Graphpad Prism Software, Version. 7.03 (Day 24 post implant).

[0865] In addition, Time to endpoint was evaluated using KAPLAN-Meyer survival graph and analysis using Graphpad Prism Software, Version. 7.03, and was performed to compare differences in median time to endpoint (TTE). Mice which achieved tumor endpoint when tumor volume exceeded 1200 mm³ and mice euthanized for reasons besides tumor volume related to disease progression, such as ulceration, metastasis, body weight loss or poor body condition were scored as dead (“1”). Animals euthanized for reasons other than tumor progression, such as adverse drug events, were censored (“0”). Log-Rank (Mantel-Cox) survival analysis was performed, and all pairwise multiple comparison procedures were performed using Holm-Sidak method with an overall significance level P<0.05 (SigmaPlot 13.0). Graphical analysis of TTE was performed in Prism (GraphPad v7.03). Individual response criteria were also evaluated and scored as either Complete Response (CR), no detectable tumor at time of last measurement; Partial Response (PR), tumor volume less than baseline measurement at any time point followed by regrowth; or No Response (NR), tumor continues to increase over baseline measurement throughout the study. The last day of the study was captured at Day 39.

[0866] On day 24 following OCI-LY-19 implantation, all animals from the untreated control group were euthanized due to tumor burden. Statistical analysis was evaluated on Day 24.

### 8.29.2. Results

[0867] Treatment with all three antibodies showed significant differences in tumor activity compared to the tumor+CD34⁺ control group. CD3hi TSP1 at 0.3 mg/kg resulted in significant tumor regressions of 47.4% whereas the CD3hi BSP1 did not achieve regressions (16.3% ΔT/ΔC). Treatment with CD3med TSP1 at 1.0 mg/kg resulted in tumor regressions 64.5% (Table 28, FIG. 34A).

[0868] There was treatment associated body weight loss with CD3hi TSP1, CD3med TSP1, and CD3hi BSP1 observed following the first dose only. The severity of body weight loss was impacted by donor as well, with different donors showing variable peak body weight loss. Without being bound by theory, the body weight change observed following the first dose is hypothesized to be target-mediated driven and exacerbated by the depletion of the inherent B cells. Body weight loss is an endpoint parameter for both disease burden and treatment induced responses. Animals with high tumor burden demonstrated disease-burden associated weight loss. Over the course of the study, body weights were observed to increase relative the initial measurement taken on the day of tumor implant, but decrease in response to the progressing disease burden (Table 28, FIG. 34B).

TABLE 28

| | | | | | | Host Response | |
|---|---|---|---|---|---|---|---|
| | | | Tumor Response | | | Δ Body | |
| | | | | | Δ Tumor burden | weight from | |
| | | | | | from initial | initial | |
| | | | | | (mm³) | (%) | Survival |
| Test | Dose | | ΔT/ΔC | Regression | (Mean ± SEM) | (Mean ± SEM) | (survivors/ |
| agent | (mg/kg) | Schedule | (%) | (%) | Day 24 | Day 24 | total) |
| Tumor + | N/A | — | — | — | 1733.60 ± 130 | −5.12 ± 4.5 | 5/5 |
| CD34⁺ | | | | | | | |
| CD3hi | 0.3 | QWx3 | — | 47.4* | −175.93 ± 76.8 | −13.51 ± 2.15 | 8/8 |
| TSP1 | | dose/IV | | | | | |
| CD3hi | 0.3 | QWx3 | 16.25* | | 281.69 ± 292.5 | −5.12 ± 1.7 | 8/8 |
| BSP1 | | dose/IV | | | | | |
| CD3med | 1.0 | QWx3 | — | 64.3* | −215.32 ± 38.48 | −11.30 ± 1.93 | 8/8 |
| TSP1 | | | | | | | |

*p < 0.05, Dunnett's multiple comparisons test

### 8.30. Example 30: Anti-Tumor Activity in a Single Dose, Dose Range Finding Study Comparing CD3hi TSP1 and CD3med TSP1 in a DLBCL Subcutaneous Tumor Model in huCD34+ NSG Mice

[0869] The anti-tumor activity of CD3hi TSP1, CD3hi BSP1, and CD3med TSP1 (H variants) were studied in an OCI-LY-19 DLBCL subcutaneous tumor model in huCD34+ NSG mice.

### 8.30.1. Materials and Methods

[0870] Female humanized CD34+ NOD.Cg-Prkdcscid Il2rgtm1Wjl/SzJ mice (HuNSG mice) were purchased from Jackson Laboratories (Sacramento, CA). Mice were humanized using cord blood.

[0871] The engraftment levels of hCD45+ cells were determined prior to shipment and confirmed in-house prior to the start of the study. HuNSG mice that had over 25% hCD45+ cells in the peripheral blood were considered as engrafted and humanized. HuNSG derived from different donors with different levels of engraftment were randomized into every treatment group in the study.

[0872] Following engraftment assessment, mice were implanted with tumor cells subcutaneously. On Day 0, OCI-LY-19 cells were harvested and suspended in Hanks Balanced Salt Solution (HBSS) at a concentration of 10×10⁷ cells/mL and then diluted 1:1 with matrigel to give a final concentration of 5×10⁷ cells/mL. Mice were implanted via subcutaneous (SQ) injection on the right flank with 5×10⁶ cells/mouse in 100 μL volume. Nine days post implant, (mean tumor volume ˜250-300 mm³ measured via calipers) mice were randomized on two parameters: donor and tumor volume. This ensured equal distribution of donors and comparable tumor volumes in each group. There were 11 groups with n=8 treatment group and n=5 in the untreated control. Mice were administered a single dose via IV administration with CD3hi TSP1 or CD3med TSP1 across the following dose range 1.0 mg/kg, 0.3 mg/gk, 0.1 mg/kg and 0.01 mg/kg. Anti-tumor activity of each antibody was compared to an untreated huCD34+SC control group that received tumor implant (tumor+CD34+) (Table 29). All treatments were administered at 10 mL/kg according to individual mouse body weights. Anti-tumor activity was determined by percent change in tumor volume of treated vs. untreated control (% ΔT/ΔC) or % regression and durability of response was evaluated by monitoring % surviving animals overtime. Animals whose TV, BW or BCS (body condition score) that reached end point criteria by exceeding limits provisioned in the lab's animal use protocol (AUP) were euthanized.

[0873] Tumor burden (TV) and body weights were recorded twice weekly. Tumor burden was measured by calipers, capturing length and width, and the tumor volume was calculated using the formula (w²×L)/3.14. Body weight was measured by scale. Both parameters were entered into an in-house system (INDIGO). Anti-tumor activity was determined by % ΔT/ΔC using the formula: 100×ΔTB_{treatment, time}/ΔTB_{control group, time} if ΔTB≥0; or % regression: (−1×(100×(TB_{final}−TBᵢₙᵢₜᵢₐₗ/TBᵢₙᵢₜᵢₐₗ) if ΔTV<0. TBᵢₙᵢₜᵢₐₗ is the tumor burden on the day of treatment initiation. (% ΔT/ΔC values<42% were considered to have anti-tumor activity). Percent body weight change was determined using the formula: 100×((BWₜᵢₘₑ−BWᵢₙᵢₜᵢₐₗ)/BWᵢₙᵢₜᵢₐₗ). Statistical analysis using One-way ANOVA with Dunnett's multiple comparison test was performed using Graphpad Prism Software, Version. 7.03. In addition, durability of response was evaluated using KAPLAN-Meyer survival graph and analysis using Graphpad Prism Software, Version. 7.03.

[0874] On day 24 following OCI-LY-19 implantation, all animals from the untreated control group were euthanized due to tumor burden. Statistical analysis was evaluated on Day 24.

### 8.30.2. Results

[0875] There was a statistical significant difference in tumor activity observed with the 1.0 mg/kg, 0.3 mg/kg and 0.1 mg/kg doses of CD3hi TSP compared to the tumor+CD34⁺ control group. CD3hi TSP1 at 1.0 mg/kg resulted in significant tumor regressions of 35.3%, whereas CD3hi TSP1 at 0.3 mg/kg and at 0.1 mg/kg showed robust significant anti-tumor activity with ΔT/ΔC values of 0.05% and 19.5%, respectively. The dose levels administered below 0.1 mg/kg did not achieve anti-tumor responses, with the 0.03 mg/kg dose of CD3hi TSP1 having a ΔT/ΔC value of 65.8% and the 0.01 mg/kg dose having a ΔT/ΔC value of 100% (Table 29, FIG. 35A).

[0876] Antibody treatments with CD3med TSP1 resulted in significant anti-tumor activity. CD3med TSP1 dosed at 1.0 mg/kg achieved significant tumor response with a ΔT/ΔC of 0.05%. The 0.3 mg/kg dose level of CD3med TSP1 did show anti-tumor activity (ΔT/ΔC: 26.9<42) but was not significant compared to the control. Doses lower that 0.3 mg/kg did not show significant tumor activity with ΔT/ΔC values of 79.8%, 90.3%, and 100% for 0.1 mg/kg, 0.03 mg/kg and 0.01 mg/kg doses, respectively (Table 29, FIG. 35C).

[0877] There was treatment associated body weight loss observed across multiple dose levels following administration of CD3hi TSP1 and CD3med TSP1. The severity of body weight loss was a combination of both donor and dose level effects, with different donors showing variable peak body weight loss. Without being bound by theory, the body weight change observed following the dose is hypothesized to be target-mediated driven and exacerbated by the depletion of the inherent B cells. Body weight loss is an endpoint parameter for both disease burden and treatment induced responses. Animals with high tumor burden demonstrated disease-burden associated weight loss. Over the course of the study, body weights were observed to increase relative to the initial measurement taken on the day of tumor implant (Table 29, FIGS. 35B and 35D), but decrease in response to the progressing disease burden.

TABLE 29

| | | | | | | Host Response | |
|---|---|---|---|---|---|---|---|
| | | | Tumor Response | | | Δ Body | |
| | | | | | Δ Tumor burden | weight from | |
| | | | | | from initial | initial | Survival |
| | | | | | (mm³) | (%) | (survivors/ |
| Test | Dose | | ΔT/ΔC | Regression | (Mean ± SEM) | (Mean ± SEM) | total) |
| agent | (mg/kg) | Schedule | (%) | (%) | Day 24 | Day 24 | Day 24 |
| Untreated | N/A | — | — | — | 1057. ± 304.2 | 6.02 ± 1.72 | 5/5 |
| control | | | | | | | |
| CD3hi | 1.0 | Single | — | 35.3* | −91.6 ± 13.8 | −1.96 ± 2.31 | 8/8 |
| TSP1 | | dose/IV | | | | | |
| CD3hi | 0.3 | Single | 0.05* | — | −0.57 ± 95.0 | −6.09 ± 2.34 | 8/8 |
| TSP1 | | dose/IV | | | | | |
| CD3hi | 0.1 | Single | 19.5* | — | 205.9 ± 170.6 | −7.06 ± 3.02 | 8/8 |
| TSP1 | | dose/IV | | | | | |
| CD3hi | 0.03 | Single | 65.8 | — | 695.0 ± 168.4 | −3.32 ± 1.63 | 8/8 |
| TSP1 | | dose/IV | | | | | |
| CD3hi- | 0.01 | Single | 100 | — | 1110.7 ± 201.7 | 4.54 ± 2.25 | 8/8 |
| TSP1 | | dose/IV | | | | | |
| CD3med | 1.0 | Single | 0.05* | — | 35.5 ± 57.6 | 3.1 ± 2.5 | 6/8 |
| TSP1 | | dose/IV | | | | | |
| CD3med | 0.3 | Single | 26.9 | — | 284.0 ± 200.9 | −3.0 ± 2.2 | 8/8 |
| TSP1 | | dose/IV | | | | | |
| CD3med | 0.1 | Single | 79.8 | — | 843.2 ± 196.5 | 0.3 ± 2.5 | 8/8 |
| TSP1 | | dose/IV | | | | | |
| CD3med | 0.03 | Single | 90.3 | — | 954.8 ± 180.1 | 4.8 ± 3.7 | 8/8 |
| TSP1 | | dose/IV | | | | | |
| CD3med | 0.01 | Single | 100 | — | 1139.3 ± 155.7 | 12.7 ± 1.8 | 8/8 |
| TSP1 | | dose/IV | | | | | |

*p < 0.05, Dunnett's multiple comparison test

### 8.31. Example 31: Anti-Tumor Activity of CD3hi BSP1, CD3hi TSP1, and CD3med TSP1 in an Adoptive Transfer Adaptation of the Daudi-Luc Burkitt's Lymphoma Subcutaneous Tumor Model in NSG Mice

[0878] The anti-tumor activity of CD3hi BSP1, CD3hi TSP1, and CD3med TSP1 (H variants) were studied in an adoptive transfer adaptation of the Daudi-Luc Burkitt's lymphoma subcutaneous tumor model in NSG mice.

### 8.31.1. Materials and Methods

[0879] On Day 0, Daudi-Luc cells were harvested and suspended in a 1:1 mixture of Hanks Balanced Salt Solution (HESS) and Matrigel at a concentration of 50×10⁶ cells/mL. Female NSG mice at ˜6 weeks old (Jackson Laboratories, ME) were injected with 5×10⁶ Daudi-Luc cells in 100 μL subcutaneously (SQ) in the right flank. Three days following tumor inoculation, each mouse received an adoptive transfer (AdT) of 15×10⁶ of peripheral blood mononuclear cells (PBMCs) in 100 μL via intravenous (IV) injection in the lateral tail vein. The PBMCs were previously isolated from a human leukopak, frozen and stored in Cryostor10 media in vapor phase liquid nitrogen tank until use. Immediately prior to AdT, PBMCs were thawed and suspended at a concentration of 150×10⁶cells/ml in Hanks Balanced Salt Solution (HBSS). When tumor volume (TV) reached an average of ˜250 cubic millimeters (mm³) measured via caliper (Day 10 post-implant), mice (n=8/group) were treated with a single IV administration of CD3hi BSP1, CD3hi TSP1, or CD3med TSP1 at dose levels of 1.0 mg/kg, 0.3 mg/kg, or 0.1 mg/kg. Anti-tumor activity of each antibody was compared to an untreated control group that received tumor implant and AdT but no treatment (tumor+AdT) (Table 30). The tumor only group was included to meter the allogeneic response observed with untreated control. All treatments were administered at 10 mL/kg according to individual mouse body weights. Anti-tumor activity was determined by percent change in tumor volume vs. change in untreated control (% ΔT/ΔC) or % regression.

[0880] Tumor volume and body weights were recorded twice weekly. Tumor volume was measured by caliper. Anti-tumor activity was determined by % ΔT/ΔC using the formula: 100×ΔTV_{treatment, time}/ΔTV_{control group, time} if ΔTV≥0; or % regression: (−1×(100×(TV_{final}−TVᵢₙᵢₜᵢₐₗ/TVᵢₙᵢₜᵢₐₗ) if ΔTV<0. TVᵢₙᵢₜᵢₐₗ is the tumor volume on the day of treatment initiation. % ΔT/ΔC values<42% were considered to have anti-tumor activity. Percent body weight change was determined using the formula: 100×((BWₜᵢₘₑ−BWᵢₙᵢₜᵢₐₗ)/BWᵢₙᵢₜᵢₐₗ). Statistical analysis using One-way ANOVA with Dunnett's multiple comparison test was performed using Graphpad Prism Software, Version. 7.03.

[0881] On day 36 following Daudi-Luc implantation, 25% of animals from the Tumor+AdT control group were euthanized due to tumor volume.

### 8.31.2. Results

[0882] This study had minimal allogeneic response (FIGS. 36A-36C).

[0883] Antibody treatment with CD3hi BSP1 at 1.0 mg/kg and 0.3 mg/kg resulted in significant tumor regressions of 85.21% and 73.26%, respectively. Antibody treatment with CD3hi BSP1 at 0.1 mg/kg exhibited significant anti-tumor activity (20.89% ΔT/ΔC value). Antibody treatment with CD3med TSP1 resulted in significant anti-tumor responses at all three dose levels: 1.0 mg/kg (90.86% regression), 0.3 mg/kg (85.13% regression), and 0.1 mg/kg (13.51% regression). Antibody treatment with CD3hi TSP1 resulted in significant tumor regressions at all three dose levels: 1.0 mg/kg (90.08% regression), 0.3 mg/kg (91.86% regression), and 0.1 mg/kg (87.52% regression).

[0884] There was no antibody associated body weight loss with any of the three constructs tested. Without being bound by theory, the body weight change observed at approximately Day 35 from baseline was most likely due to the onset of graft-versus host disease (GvHD). Body weight loss is an endpoint parameter for onset of GvHD. At 32-39 days post-PBMC injection (35-42 days post-tumor implant), animals began to exhibit weight loss attributed to GvHD. Over the course of the study, body weights increased relative the initial measurement taken on the day of tumor implant (Table 30, FIGS. 37A-37C). However at the end of study, the body weight loss observed relative to the peak gain is indicative of GvHD-induced weight loss.

TABLE 30

| | | | | | | Host Response | |
|---|---|---|---|---|---|---|---|
| | | | Tumor Response | | | Δ Body | |
| | | | | | Δ Tumor burden | weight from | |
| | | | | | from initial | initial | |
| | | | | | (mm³) | (%) | Survival |
| Test | Dose | | ΔT/ΔC | Regression | (Mean) | (Mean ± SEM) | (survivors/ |
| agent | (mg/kg) | Schedule | (%) | (%) | Day 36 | Day 36 | total) |
| Tumor | N/A | — | 119.42 | — | 1633.79 | 11.653 ± 1.871 | 4/8 |
| only | | | | | | | |
| Tumor + | N/A | — | 100.00 | — | 1368.13 | 8.435 ± 2.241 | 8/8 |
| Adt | | | | | | | |
| (Untreated | | | | | | | |
| Control) | | | | | | | |
| CD3hi | 1.0 | Single | — | 85.21 | −124.67 | 0.296 ± 3.360 | 8/8 |
| BSP1 | | dose/IV | | | | | |
| CD3hi | 0.3 | Single | — | 73.26 | −107.15 | 8.394 ± 6.267 | 8/8 |
| BSP1 | | dose/IV | | | | | |
| CD3hi | 0.1 | Single | 20.89 | — | 285.84 | −0.359 ± 2.569 | 8/8 |
| BSP1 | | dose/IV | | | | | |
| CD3hi | 1.0 | Single | — | 90.08 | −131.77 | 5.423 ± 2.220 | 8/8 |
| TSP1 | | dose/IV | | | | | |
| CD3hi | 0.3 | Single | — | 91.86 | −134.39 | 2.254 ± 2.975 | 8/8 |
| TSP1 | | dose/IV | | | | | |
| CD3hi | 0.1 | Single | — | 87.52 | −128.03 | −0.506 ± 4.777 | 8/8 |
| TSP1 | | dose/IV | | | | | |
| CD3med | 1.0 | Single | — | 90.86 | −132.92 | 3.839 ± 1.597 | 8/8 |
| TSP1 | | dose/IV | | | | | |
| CD3med | 0.3 | Single | — | 85.13 | −124.57 | 3.214 ± 1.737 | 8/8 |
| TSP1 | | dose/IV | | | | | |
| CD3med | 0.1 | Single | — | 13.51 | −19.77 | 0.165 ± 2.561 | 8/8 |
| TSP1 | | dose/IV | | | | | |

### 8.32. Example 32: Design—Selection of Residue Positions

[0885] Design strategies were tested to produce a set of antibodies with modified Fc regions that might exhibit desired properties such as diminished effector functions. Early studies defining key amino acid binding sites on IgG for Fc gamma receptors were performed by mutational analyses, and it was determined that the lower hinge, proximal CH2 region and glycosylation of N297 were critical (Shields et al., 2001). Mutations were introduced into the regions that interact with Fc gamma receptors with the goal to diminish residual binding to Fc gamma receptors. For this particular reason, it was necessary to test various combinations of Fc positions and generate set of mutations without compromising antibody drug developability and immunogenicity risk. Several mutation sets were generated and compared to wildtype IgG1. In Examples 33-36: LALAPA-IgG1 (L234A/L235A/P329A), LALAGA-IgG1 (L234A/L235A/G237A), LALAPG-IgG1 (L234A/L235A/P329G), DAPA-IgG1 (D265A/P329A), LALASKPA-IgG1 (L234A/L235A/S267K/P329A), DAPASK-IgG1 (D265A/P329A/S267K), GADAPA-IgG1 (G237A/D265A/P329A), GADAPASK-IgG1 (G237A/D265A/P329A/S267K) and DANAPA-IgG1 (D265A/N297A/P329A) were evaluated. Previously described DAPA and DANAPA silencing motifs were included for comparison. In Examples 37-39: LALA (L234A/L235A), LALASKPA (L234A/L235A/S267K/P329A), GADAPASK (G237A/D265A/P329A/S267K) and DANAPA (D265A/N297A/P329A) mutation sets were evaluated.

### 8.33. Example 33: Expression and Purification of Fc Modified CD3 Antibodies

[0886] For the experiments described below antibodies against CD3 containing the indicated amino acid substitutions and expressed by the nucleotide sequences as indicated, were used as listed in Tables A and B. IgG1 molecules were expressed in HEK293 mammalian cells, and purified using protein A and size exclusion chromatography. In brief, heavy chain and light chain DNA of anti-CD3 WT IgG1 were synthesized at GeneArt (Regensburg, Germany) and cloned into a mammalian expression vector using restriction enzyme-ligation based cloning techniques. All variants described herein were then generated using PCR based mutagenesis. The resulting plasmids were co-transfected into HEK293T cells. For transient expression of antibodies, equal quantities of vector for each chain were co-transfected into suspension-adapted HEK293T cells using Polyethylenimine (PEI; Cat #24765 Polysciences, Inc.). Typically, 100 ml of cells in suspension at a density of 1-2 Mio cells per ml was transfected with DNA containing 50 μg of expression vector encoding the heavy chain and 50 μg expression vectors encoding the light chain. The recombinant expression vectors were then introduced into the host cells and the construct produced by further culturing of the cells for a period of 7 days to allow for secretion into the culture medium (HEK, serum-fee medium) supplemented with 0.1% pluronic acid, 4 mM glutamine, and 0.25 μg/ml antibiotic.

[0887] The produced construct was then purified from cell-free supernatant using immunoaffinity chromatography. MabSelect Sure resin (GE Healthcare Life Sciences), equilibrated with PBS buffer pH 7.4 was incubated with filtered conditioned media using liquid chromatography system (Aekta pure chromatography system, GE Healthcare Life Sciences). The resin was washed with PBS pH 7.4 before the constructs were eluted with elution buffer (50 mM citrate, 90 mM NaCl, pH 2.7). After capture, eluted proteins were pH neutralized using 1M TRIS pH 10.0 solution and polished using size exclusion chromatography technique (HiPrep Superdex 200 16/60, GE Healthcare Life Sciences). Purified proteins were finally formulated in PBS buffer pH 7.4.

### 8.34. Example 34: Biophysical Properties of Fc Modified CD3 Antibodies: SPR-Binding of Modified Antibodies to Human Fc Gamma Receptors and Human C1q

[0888] Surface plasmon resonance (SPR) experiments were performed to analyze the interaction of human activating receptors FcγR1A, FcγR3A (V158) and human C1q with IgG1 WT and antibody-Fc variants. Binding kinetics and their relative binding affinities were explored. The binding affinity is an important characteristic of an interaction between an antibody and an antigen. The equilibrium dissociation constant (KD) defines how strong the interaction is and therefore how much antibody-antigen complex is formed at equilibrium.

[0889] The knowledge of the antibody characteristics is not only essential during selection of the best therapeutic antibody candidate, but also important to understand the in vivo behavior and potentially predict cellular immune responses. The aim is to generate antibody variants with little or no binding to Fc gamma receptors to reduce or eliminate effector function aiming to improve the safety of monoclonal antibody therapeutics. Binding to human C1q was evaluated. All SPR buffers were prepared using deionized water. The samples were prepared in running buffer PBS pH 7.4 with 0.005% Tween-20. SPR measurements were measured on a Biacore T200 (GE-Healthcare Life Sciences) controlled by Biacore T200 control software version 2.0.1. Surface plasmon resonance was conducted using a Biacore T200 to assess binding affinity of antibody IgG1 WT and variants to human Fc receptors, including FcγR1A, and FcγR3A (V158) and human C1q.

[0890] The antibodies were covalently immobilized on a CM5 sensor chip whereas Fc gamma receptors or human C1q served as analytes in solution (FIG. 38). For Fc gamma receptors binding evaluation (method 1), antibodies were diluted in 10 mM sodium acetate pH 4 and immobilized at a density of approximately 950 resonance units (RU's) on the CM5 sensor chip applying a standard amine coupling procedure. Flow cell 1 was blank immobilized to serve as a reference. The kinetic binding data were collected by subsequent injections of 1:2 dilution series of the human Fc gamma receptors on all flow cells at a flow rate of 30 μl/min and at a temperature of 25° C. The Fc gamma receptors were diluted in the running buffer at concentrations ranging from 0.2 nM to 1000 nM (e.g. FcγR1A: 0.2 to 100 nM, FcγR3A V158: 1.95 to 1000 nM). The chip surface was regenerated using 20 mM glycine pH 2.0 solution after each measuring cycle. For human C1q binding evaluation (method 2), antibodies were diluted in 10 mM sodium acetate pH 4 and immobilized at a density of approximately 7000 resonance units (RU's) on the CM5 sensor chip applying a standard amine coupling procedure. Flow cell 1 was blank immobilized to serve as a reference. The kinetic binding data were collected by subsequent injections of 1:2 dilution series of the human C1q on all flow cells at a flow rate of 30 μl/min and at a temperature of 25° C. The human C1q was diluted in the running buffer at concentrations ranging from 0.49 nM to 250 nM. The chip surface was regenerated using 50 mM NaOH solution after each measuring cycle. Zero concentration samples (blank runs) were measured for both methods to allow double-referencing during data evaluation.

[0891] Data were evaluated using the Biacore T200 evaluation software. The raw data were double referenced, i.e. the response of the measuring flow cell was corrected for the response of the reference flow cell, and in a second step the response of a blank injection was subtracted. Then the sensorgrams were fitted by applying a 1:1 kinetic binding model to calculate dissociation equilibrium constants. In addition, the maximum response reached during the experiment was monitored. Maximum response describes the binding capacity of the surface in terms of the response at saturation. The maximum response values summarizing these interactions are given in Table 31. The SPR Biacore binding sensorgrams for each variant to each receptor were depicted in FIG. 39, Concentration range: 0.2 nM-100 nM for FcgR1, 7.8 nM-4000 nm for FcgR2A R131 d FcγR3A (V158 and F158). FIG. 39A shows representative sensorgrams and response plots of WT and variants towards FcgammaR1A (Concentration range: 0.2 nM-100 nM for human FcγR1A). FIG. 39B shows representative sensorgrams and response plots of WT and variants towards FcgammaR3A V158 (Concentration range: 1.95 nM-1000 nM for human FcγR3A V158). FIG. 39C shows representative sensorgrams and response plots of WT and variants towards human C1q (Concentration range: 0.49 nM-250 nM for human C1q). All IgG1 antibody-Fc variants inhibit the binding to Fc gamma receptors compare to WT and little or no residual binding was measured. All IgG1 antibody-Fc variants inhibit the binding to human C1q compare to WT as low residual binding was measured.

TABLE 31
Maximum responses of WT-Fc and variants towards
human FcgammaRs and C1q determined by surface
plasmon resonance

| | | Maximum | Maximum | |
|---|---|---|---|---|
| | | response at | response at | Maximum |
| | SEQ | 100 nM | 1000 nM | response |
| | ID | hFcgammaRIA | hFcgammaRIIIA | at 250 nM |
| Fc | NO | (RU) | V158 (RU) | hC1q (RU) |
| WT | | 193 | 79 | 680 |
| WT | | 193 | 72 | 640 |
| allotype | | | | |
| DANAPA | | 11 | 31 | 29 |
| DAPA | | 63 | 15 | 85 |
| LALAPA | | 26 | 19 | 270 |
| LALAPG | | 18 | 33 | 245 |
| LALAGA | | 15 | 25 | 335 |
| LALASKPA | | 9 | 20 | 95 |
| DAPASK | | 13 | 15 | 86 |
| GADAPA | | 16 | 9 | 203 |
| GADAPASK | | 10 | 12 | 168 |

### 8.35. Example 35: Differential Scanning Calorimetry- Melting Temperature of Modified Antibodies

[0892] The thermal stability of engineered antibodies CH2 domains were compared using calorimetric measurements as shown in Table 32. Calorimetric measurements were carried out on a differential scanning micro calorimeter (Nano 0SC, TA instruments). The cell volume was 0.5 ml and the heating rate was 1° C./min. All proteins were used at a concentration of 1 mg/mi in PBS (pH 7.4). The molar heat capacity of each protein was estimated by comparison with duplicate samples containing identical buffer from which the protein had been omitted. The partial molar heat capacities and melting curves were analyzed using standard procedure. Thermograms were baseline corrected and concentration normalized. The silent version LALASKPA (70LC) shows significantly better Tm compared to DANAPA (62C).

TABLE 32
Melting temperatures of WT-Fc and variants

| | Melting temperature (Tm) of |
|---|---|
| Fc | CH2 domain |
| WT | 70 |
| WT allotype R214K | 70 |
| LALAPA | 70 |
| LALAGA | 70 |
| LALAPG | 70 |
| DAPA | 65 |
| LALASKPA | 70 |
| DAPASK | 65 |
| GADAPA | 65 |
| GADAPASK | 65 |
| DANAPA | 62 |

### Aggregation Propensity Post Capture of IgG1 Anti-CD3 Antibody and Fc Variants

[0893] Size exclusion chromatography measurements were performed to evaluate the aggregation propensity (% HMW) of IgG1 antibody and Fc modified derivatives. The produced and purified anti 003 antibodies were applied to an analytical size exclusion chromatography column (SEC 200, GE Healthcare), equilibrated with PBS buffer pH 7.4. Results are summarized in Table 33.

TABLE 33
Higher molecular weight content (%) of anti-CD3
antibodies

| Fc | (%) higher molecular weight |
|---|---|
| WT | 7.3 |
| WT allotype R214K | 7.7 |
| LALAPA | 1.8 |
| LALAGA | 2.9 |
| LALAPG | 4.2 |
| DAPA | 3.9 |
| LALASKPA | 4.9 |
| DAPASK | 3.6 |
| GADAPA | 8.0 |
| GADAPASK | 6.8 |
| DANAPA | 5.9 |

### 8.36. Example 36: Anti-CD3 NFAT Signalling Assay

[0894] Jurkat reporter gene assay (RGA) for the nuclear factor of activated T-cells (N FAT) pathway was performed using Jurkat NFAT luciferized (JNL) cells and THP-1 cells (ATCC, TI1B202). THP-1 cells express FcγRI, FcγRII, and FcγRIII. Cells were co-incubated for 6 hours at 37° C., 5% C02 at a 5:1 effector to tumor ratio with each sample at the various concentrations depicted. An equal volume of ONE-Glo™ reagent (Promega, E6110) was added to the culture volume. Plate was shaken for 2 minutes, then incubated for an additional 8 minutes protected from light. For JNL+THP+IFNg experiment, THP-1 cells were pre-treated with 100 u/mL IFNg for 48 hours at 37° C., 5% C02 before co-culture. IFNg stimulation increases FcγRI expression. Luciferase activity was quantitated on the EnVision plate reader (PerkinElmer). Data was analyzed and fit to a 5 parameter-logistic curve using GraphPad Prism.

[0895] In both treatments, WT showed the greatest NFAT activity. All silencing mutation sets overall showed significantly dampened NFAT activation. In the RGA, performed without IFNg (FIG. 40A), all silencing mutation sets showed comparable T-cell activation with the exception of DAPA. When the THP-1 cells were preincubated with IFNg (FIG. 40B), the mutation sets showed lower activity, demonstrating strong Fc silencing, but some activity remaining in DAPA, LALAPA and GADAPA.

### 8.37. Example 37: Expression and Purification of Modified Antibodies

[0896] For the experiments described below antibodies were used as shown in Table 34. Designed molecules were expressed in HEK293 mammalian cells, and purified using protein A and size exclusion chromatography. In brief, heavy chains and light chain DNA were synthesized at GeneArt (Regensburg, Germany) and cloned into a mammalian expression vector using restriction enzyme-ligation based cloning techniques. The resulting plasmids were co-transfected into HEK293T cells. For transient expression of antibodies, equal quantities of vector for each chain were co-transfected into suspension-adapted HEK293T cells using Polyethylenimine (PEI; Cat #24765 Polysciences, Inc.). Typically, 100 ml of cells in suspension at a density of 1-2 Mio cells per ml was transfected with DNA containing 33 μg of expression vector encoding the first heavy chain, 33 μg of expression vector encoding the second heavy chain and 33 μg expression vectors encoding the light chain. The recombinant expression vectors were then introduced into the host cells and the construct produced by further culturing of the cells for a period of 7 days to allow for secretion into the culture medium (HEK, serum-fee medium) supplemented with 0.1% pluronic acid, 4 mM glutamine, and 0.25 μg/ml antibiotic.

[0897] The produced construct was then purified from cell-free supernatant using immunoaffinity chromatography. MabSelect Sure resin (GE Healthcare Life Sciences), equilibrated with PBS buffer pH 7.4 was incubated with filtered conditioned media using liquid chromatography system (Aekta pure chromatography system, GE Healthcare Life Sciences). The resin was washed with PBS pH 7.4 before the constructs were eluted with elution buffer (50 mM citrate, 90 mM NaCl, pH 2.7). After capture, eluted proteins were pH neutralized using 1M TRIS pH 10.0 solution and polished using size exclusion chromatography technique (HiPrep Superdex 200 16/60, GE Healthcare Life Sciences). Purified proteins were finally formulated in PBS buffer pH 7.4.

TABLE 34
Sequences of Antibodies and Fc variant

| SEQ ID | | |
|---|---|---|
| No | Description | Sequence |
| 1110 | Anti-CD19 light | eivmtqspatlsvspgeratlscrasqdvgtavawyqqkpgqaprlliywastr |
| | chain | htgiparfsgsgsgteftltisslqsedfavyfcqqyanfplytfgqgtkleikrtvaa |
| | Amino acid | psvfifppsdeqlksgtasvvcllnnfypreakvqwkvdnalqsgnsqesvteq |
| | sequence | dskdstyslsstltlskadyekhkvyacevthqglsspvtksfnrgec |
| 1111 | Anti-CD19 light | gagatcgtgatgacacagtctccagccacactgtccgtgtctccaggcgagag |
| | chain | agctacactgagctgtagagccagccaggatgtgggaacagccgtggcctg |
| | Nucleic acid | gtatcagcagaaacctggacaagcccctcggctgctgatctactgggcctcta |
| | sequence | caagacacacaggcatccctgccagattttctggcagcggctctggcaccga |
| | | gttcaccctgacaatctctagcctccagagcgaggacttcgccgtgtacttctgc |
| | | cagcagtacgccaactttcccctgtacacctttggccagggcaccaagctgga |
| | | aatcaagagaacagtggccgctccgagcgtgttcatctttccaccaagcgacg |
| | | agcagctgaaaagcggcacagcctctgtcgtgtgcctgctgaacaacttctac |
| | | cccagagaagccaaggtgcagtggaaggtggacaatgccctccagtccggc |
| | | aatagccaagagagcgtgaccgagcaggacagcaaggatagcacataca |
| | | gcctgagcagcacactgaccctgagcaaggccgactacgagaagcacaaa |
| | | gtgtacgcctgcgaagtgacacaccagggcctgtctagccctgtgaccaaga |
| | | gcttcaacagaggcgagtgc |
| 1112 | Anti-CD19-CD3 | qvqlvqsgaevkkpgasvkvsckasgytfttywiqwvrqapgqrlewmgav |
| | WT IgG1 | ypgdadtrytqkfqgrvtltadrsastaymelsslrsedtavyycgrdagleyyal |
| | Heavy Chain | dywgqgtlvtvssastkgpsvfplapsskstsggtaalgclvkdyfpepvtvsw |
| | Amino acid | nsgaltsgvhtfpavlqssglyslssvvtvpssslgtqtyicnvnhkpsntkvdkr |
| | sequence | vepkscggggsggggsevqlvesggglvqpggslklscaasgftfntyamn |
| | | wvrqasgkglewvgrirskynnyatyyadsvkdrftisrddskstlylqmnslkt |
| | | edtavyycvrhgnfgnsyvswfaywgqgtlvtvssggggsggggsggggsg |
| | | gggsqavvtqepsltvspggtvtltcrsstgavttsnyanwvqqkpgqaprglig |
| | | gtnkrapwtparfsgsllgdkaaltlsgaqpedeaeyfcalwysnlwvfgggtkl |
| | | tvlggggsdkthtcppcpapellggpsvflfppkpkdtlmisrtpevtcvvvdvs |
| | | hedpevkfnwyvdgvevhnaktkpreeqynstyrvvsvltvlhqdwlngkey |
| | | kckvsnkalpapiektiskakgqprepqvctlppsreemtknqvslscavkgfy |
| | | psdiavewesngqpennykttppvldsdgsfflvskltvdksrwqqgnvfscs |
| | | vmhealhnhytqkslslspgk |
| 1113 | Anti-CD19-CD3 | caggttcaactggttcagagcggagccgaagtgaagaaacctggggccagc |
| | WT IgG1 | gtgaaggtgtcctgtaaagccagcggctacacctttaccacctactggattcagt |
| | Heavy Chain | gggtccgacaggcccctggacagagacttgaatggatgggagctgtgtaccc |
| | Nucleic acid | cggcgacgccgataccagatacacccagaaattccagggcagagtgaccct |
| | sequence | gacagccgatagaagcgccagcacagcctacatggaactgagcagcctga |
| | | gaagcgaggataccgccgtgtactactgtggcagagatgccggcctggaata |
| | | ttacgccctggactattggggccagggcaccctggttacagtgtcctctgcctcta |
| | | caaagggcccctccgtttttccactggctcctagcagcaagagcacatctggtg |
| | | gaacagccgctctgggctgcctggtcaaggattactttcctgagcctgtgaccgt |
| | | gtcctggaatagcggagcactgacaagcggcgtgcacacatttccagccgtg |
| | | ctgcaaagcagcggcctgtactctctgtctagcgtggtcacagtgcctagctcta |
| | | gcctgggcacccagacctacatctgcaacgtgaaccacaagcctagcaaca |
| | | ccaaggtcgacaagagagtggaacccaagtcttgtggtggcggaggatctgg |
| | | cggaggcggatctgaagttcagcttgttgaatctggcggcggactggtgcaac |
| | | ctggcggatctctgaaactgtcttgtgccgcctccggcttcaccttcaatacctac |
| | | gccatgaactgggttcgacaagcctccggcaaaggactggaatgggtcgga |
| | | cggatcagaagcaagtacaacaactacgccacctactacgccgactccgtg |
| | | aaggacagattcaccatcagccgggacgactccaagagcaccctgtacctcc |
| | | agatgaactccctgaaaaccgaggacacagccgtctattattgcgtgcggcac |
| | | ggcaacttcggcaacagctatgtgtcttggtttgcctactggggacagggaacc |
| | | ctcgtgaccgtttcttcaggcggcggtggtagtggcggtggtggtagcggaggc |
| | | ggtggatcaggtggcggcggttctcaagctgtggtcacacaagagcccagcct |
| | | gacagtttctcctggcggaaccgtgacactgacctgtagatctagcaccggcg |
| | | cagtgaccaccagcaattacgctaactgggtgcagcagaagcccggccaag |
| | | ctcctagaggactgatcggaggcacaaacaagagagccccttggacaccag |
| | | ccagattttctggctctctgctgggcgataaggccgctcttacactgtctggcgca |
| | | cagcctgaagatgaggccgagtacttttgcgccctgtggtacagcaacctgtgg |
| | | gtgttcggcggaggaacaaagctgacagttcttggaggcggcggaagcgac |
| | | aagacccacacatgtcctccatgtcctgctccagaactgctcggcggaccctcc |
| | | gtgtttctgttccctccaaagccaaaggacaccctgatgatcagcagaacccct |
| | | gaagtgacctgcgtggtggtggatgtgtctcacgaggacccagaagtgaagtt |
| | | caattggtacgtggacggcgtggaagtgcacaacgccaagaccaagcctag |
| | | agaggaacagtacaacagcacctacagagtggtgtccgtgctgacagtgctg |
| | | caccaggactggctgaacggcaaagagtacaagtgcaaggtgtccaacaa |
| | | ggccctgcctgctcctatcgagaaaaccatcagcaaggccaagggccagcct |
| | | agggaacctcaagtgtgcactctgcctccaagccgggaagagatgaccaag |
| | | aatcaggtgtccctgagctgcgccgtgaagggcttttacccttccgatatcgccg |
| | | tggaatgggagagcaatggccagccagagaacaactacaagaccacacct |
| | | cctgtgctggacagcgacggctcattcttcctggtgtctaagctgaccgtggaca |
| | | agagcagatggcagcagggcaacgtgttcagctgttctgtgatgcacgaggc |
| | | cctgcacaaccactacacacagaagtccctgtctctgagccccggcaaa |
| 1114 | Anti-CD58 | sqqiygvvygnvtfhvpsnvplkevlwkkqkdkvaelensefrafssfknrvyl |
| | WT IgG1 | dtvsgsltiynltssdedeyemespnitdtmkfflyvlesggggsdkthtcppcp |
| | Heavy Chain | apellggpsvflfppkpkdtlmisrtpevtcvvvdvshedpevkfnwyvdgvev |
| | Amino acid | hnaktkpreeqynstyrvvsvltvlhqdwlngkeykckvsnkalpapiektisk |
| | sequence | akgqprepqvytlppcreemtknqvslwclvkgfypsdiavewesngqpen |
| | | nykttppvldsdgsfflyskltvdksrwqqgnvfscsvmhealhnhytqkslsls |
| | | pgk |
| 1115 | Anti-CD58 | tctcagcagatctatggcgtggtgtacggcaacgtgaccttccacgtgccaagc |
| | WT IgG1 | aacgtgcccctgaaagaggtgctctggaagaaacagaaagacaaggtggc |
| | Heavy Chain | cgagctggaaaacagcgagttcagagccttcagcagcttcaagaaccgggt |
| | Nucleic acid | gtacctggataccgtgtccggcagcctgaccatctacaatctgaccagcagcg |
| | sequence | acgaggacgagtacgagatggaaagccccaacatcaccgacaccatgaag |
| | | ttctttctgtacgtgctggaaagcggcggaggcggctctgataagacacacac |
| | | atgtcctccatgtcctgctccagagctgctcggcggaccttctgttttcctgtttcca |
| | | cctaagccaaaggacaccctgatgatcagcagaacccctgaagtgacctgc |
| | | gtggtggtggatgtgtctcacgaggaccccgaagtgaagttcaattggtacgtg |
| | | gacggcgtggaagtgcacaacgccaagaccaagcctagagaggaacagt |
| | | acaacagcacctacagagtggtgtccgtgctgaccgtgctgcaccaggattgg |
| | | ctgaacggcaaagagtacaagtgcaaggtgtccaacaaggccctgcctgctc |
| | | ctatcgagaaaaccatcagcaaggccaagggccagccaagagaacccca |
| | | ggtttacaccctgcctccatgccgggaagagatgaccaagaatcaggtgtccc |
| | | tgtggtgcctggtcaagggcttctacccttccgatatcgccgtggaatgggaga |
| | | gcaatggccagcctgagaacaactacaagaccacacctcctgtgctggaca |
| | | gcgacggctcattcttcctgtacagcaagctgacagtggacaagagcagatg |
| | | gcagcagggcaacgtgttcagctgttctgtgatgcacgaggccctgcacaacc |
| | | actacacccagaagtctctgtctctgagccccggcaaa |
| 1116 | Anti-CD19-CD3 | qvqlvqsgaevkkpgasvkvsckasgytfttywiqwvrqapgqrlewmgav |
| | DANAPA IgG1 | ypgdadtrytqkfqgrvtltadrsastaymelsslrsedtavyycgrdagleyyal |
| | Heavy Chain | dywgqgtlvtvssastkgpsvfplapsskstsggtaalgclvkdyfpepvtvsw |
| | Amino acid | nsgaltsgvhtfpavlqssglyslssvvtvpssslgtqtyicnvnhkpsntkvdkr |
| | sequence | vepkscggggsggggsevqlvesggglvqpggslklscaasgftfntyamn |
| | | wvrqasgkglewvgrirskynnyatyyadsvkdrftisrddskstlylqmnslkt |
| | | edtavyycvrhgnfgnsyvswfaywgqgtlvtvssggggsggggsggggsg |
| | | gggsqavvtqepsltvspggtvtltcrsstgavttsnyanwvqqkpgqaprglig |
| | | gtnkrapwtparfsgsllgdkaaltlsgaqpedeaeyfcalwysnlwvfgggtkl |
| | | tvlggggsdkthtcppcpapellggpsvflfppkpkdtlmisrtpevtcvvvavs |
| | | hedpevkfnwyvdgvevhnaktkpreeqyastyrvvsvltvlhqdwlngkey |
| | | kckvsnkalaapiektiskakgqprepqvctlppsreemtknqvslscavkgfy |
| | | psdiavewesngqpennykttppvldsdgsfflvskltvdksrwqqgnvfscs |
| | | vmhealhnhytqkslslspgk |
| 1117 | Anti-CD19-CD3 | caggttcaactggttcagagcggagccgaagtgaagaaacctggggccagc |
| | DANAPA IgG1 | gtgaaggtgtcctgtaaagccagcggctacacctttaccacctactggattcagt |
| | Heavy Chain | gggtccgacaggcccctggacagagacttgaatggatgggagctgtgtaccc |
| | Nucleic acid | cggcgacgccgataccagatacacccagaaattccagggcagagtgaccct |
| | sequence | gacagccgatagaagcgccagcacagcctacatggaactgagcagcctga |
| | | gaagcgaggataccgccgtgtactactgtggcagagatgccggcctggaata |
| | | ttacgccctggactattggggccagggcaccctggttacagtgtcctctgcctcta |
| | | caaagggcccctccgtttttccactggctcctagcagcaagagcacatctggtg |
| | | gaacagccgctctgggctgcctggtcaaggattactttcctgagcctgtgaccgt |
| | | gtcctggaatagcggagcactgacaagcggcgtgcacacatttccagccgtg |
| | | ctgcaaagcagcggcctgtactctctgtctagcgtggtcacagtgcctagctcta |
| | | gcctgggcacccagacctacatctgcaacgtgaaccacaagcctagcaaca |
| | | ccaaggtcgacaagagagtggaacccaagtcttgtggtggcggaggatctgg |
| | | cggaggcggatctgaagttcagcttgttgaatctggcggcggactggtgcaac |
| | | ctggcggatctctgaaactgtcttgtgccgcctccggcttcaccttcaatacctac |
| | | gccatgaactgggttcgacaagcctccggcaaaggactggaatgggtcgga |
| | | cggatcagaagcaagtacaacaactacgccacctactacgccgactccgtg |
| | | aaggacagattcaccatcagccgggacgactccaagagcaccctgtacctcc |
| | | agatgaactccctgaaaaccgaggacacagccgtctattattgcgtgcggcac |
| | | ggcaacttcggcaacagctatgtgtcttggtttgcctactggggacagggaacc |
| | | ctcgtgaccgtttcttcaggcggcggtggtagtggcggtggtggtagcggaggc |
| | | ggtggatcaggtggcggcggttctcaagctgtggtcacacaagagcccagcct |
| | | gacagtttctcctggcggaaccgtgacactgacctgtagatctagcaccggcg |
| | | cagtgaccaccagcaattacgctaactgggtgcagcagaagcccggccaag |
| | | ctcctagaggactgatcggaggcacaaacaagagagccccttggacaccag |
| | | ccagattttctggctctctgctgggcgataaggccgctcttacactgtctggcgca |
| | | cagcctgaagatgaggccgagtacttttgcgccctgtggtacagcaacctgtgg |
| | | gtgttcggcggaggaacaaagctgacagttcttggaggcggcggaagcgac |
| | | aagacccacacatgtcctccatgtcctgctccagaactgctcggcggaccctcc |
| | | gtgtttctgttccctccaaagccaaaggacaccctgatgatcagcagaacccct |
| | | gaagtgacctgtgtggtggtggccgtgtctcacgaggacccagaagtgaagtt |
| | | caattggtacgtggacggcgtggaagtgcacaacgccaagaccaagcctag |
| | | agaggaacagtacgccagcacctacagagtggtgtctgtgctgacagtgctg |
| | | caccaggactggctgaacggcaaagagtacaagtgcaaggtgtccaacaa |
| | | ggccctggccgctcctatcgagaaaaccatctctaaggccaagggccagcct |
| | | cgggaacctcaagtgtgcactcttccacctagccgggaagagatgaccaaga |
| | | accaggtgtcactgagctgcgccgtgaagggcttctacccttctgatatcgccgt |
| | | ggaatgggagagcaacggccagccagagaacaactacaagaccacacct |
| | | cctgtgctggacagcgacggctcattcttcctggtgtctaagctgaccgtggaca |
| | | agagcagatggcagcagggcaacgtgttcagctgttctgtgatgcacgaggc |
| | | cctgcacaaccactacacacagaagtccctgtctctgagccccggcaaa |
| 1118 | Anti-CD58 | sqqiygvvygnvtfhvpsnvplkevlwkkqkdkvaelensefrafssfknrvyl |
| | DANAPA IgG1 | dtvsgsltiynltssdedeyemespnitdtmkfflyvlesggggsdkthtcppcp |
| | Heavy Chain | apellggpsvflfppkpkdtlmisrtpevtcvvvavshedpevkfnwyvdgvev |
| | Amino acid | hnaktkpreeqyastyrvvsvltvlhqdwlngkeykckvsnkalaapiektisk |
| | sequence | akgqprepqvytlppcreemtknqvslwclvkgfypsdiavewesngqpen |
| | | nykttppvldsdgsfflyskltvdksrwqqgnvfscsvmhealhnhytqkslsls |
| | | pgk |
| 1119 | Anti-CD58 | tctcagcagatctatggcgtggtgtacggcaacgtgaccttccacgtgccaagc |
| | DANAPA IgG1 | aacgtgcccctgaaagaggtgctctggaagaaacagaaagacaaggtggc |
| | Heavy Chain | cgagctggaaaacagcgagttcagagccttcagcagcttcaagaaccgggt |
| | Nucleic acid | gtacctggataccgtgtccggcagcctgaccatctacaatctgaccagcagcg |
| | sequence | acgaggacgagtacgagatggaaagccccaacatcaccgacaccatgaag |
| | | ttctttctgtacgtgctggaaagcggcggaggcggctctgataagacacacac |
| | | atgtcctccatgtcctgctccagagctgctcggcggaccttctgttttcctgtttcca |
| | | cctaagccaaaggacaccctgatgatcagcagaacccctgaagtgacctgtg |
| | | tggtggtggccgtgtctcacgaagatcccgaagtgaagttcaattggtacgtgg |
| | | acggcgtggaagtgcacaacgccaagaccaagcctagagaggaacagta |
| | | cgccagcacctatagagtggtgtccgtgctgacagtgctgcaccaggactggc |
| | | tgaacggcaaagagtacaagtgcaaggtgtccaacaaggccctggccgctc |
| | | ctatcgagaaaaccatctctaaggccaagggccagcctcgggaaccacagg |
| | | tttacaccctgcctccatgccgggaagagatgaccaagaatcaggtgtccctgt |
| | | ggtgcctggtcaagggcttctacccttccgatatcgccgtggaatgggagagca |
| | | atggccagcctgagaacaactacaagaccacacctcctgtgctggacagcg |
| | | acggctcattcttcctgtacagcaagctgaccgtggacaagagcagatggcag |
| | | cagggcaacgtgttcagctgttctgtgatgcacgaggccctgcacaaccacta |
| | | cacccagaagtctctgtctctgagccccggcaaa |
| 1120 | Anti-CD19-CD3 | qvqlvqsgaevkkpgasvkvsckasgytfttywiqwvrqapgqrlewmgav |
| | GADAPASK IgG1 | ypgdadtrytqkfqgrvtltadrsastaymelsslrsedtavyycgrdagleyyal |
| | Heavy Chain | dywgqgtlvtvssastkgpsvfplapsskstsggtaalgclvkdyfpepvtvsw |
| | Amino acid | nsgaltsgvhtfpavlqssglyslssvvtvpssslgtqtyicnvnhkpsntkvdkr |
| | sequence | vepkscggggsggggsevqlvesggglvqpggslklscaasgftfntyamn |
| | | wvrqasgkglewvgrirskynnyatyyadsvkdrftisrddskstlylqmnslkt |
| | | edtavyycvrhgnfgnsyvswfaywgqgtlvtvssggggsggggsggggsg |
| | | gggsqavvtqepsltvspggtvtltcrsstgavttsnyanwvqqkpgqaprglig |
| | | gtnkrapwtparfsgsllgdkaaltlsgaqpedeaeyfcalwysnlwvfgggtkl |
| | | tvlggggsdkthtcppcpapellgapsvflfppkpkdtlmisrtpevtcvvvavk |
| | | hedpevkfnwyvdgvevhnaktkpreeqynstyrvvsvltvlhqdwlngkey |
| | | kckvsnkalaapiektiskakgqprepqvctlppsreemtknqvslscavkgfy |
| | | psdiavewesngqpennykttppvldsdgsfflvskltvdksrwqqgnvfscs |
| | | vmhealhnhytqkslslspgk |
| 1121 | Anti-CD19-CD3 | caggttcaactggttcagagcggagccgaagtgaagaaacctggggccagc |
| | GADAPASK IgG1 | gtgaaggtgtcctgtaaagccagcggctacacctttaccacctactggattcagt |
| | Heavy Chain | gggtccgacaggcccctggacagagacttgaatggatgggagctgtgtaccc |
| | Nucleic acid | cggcgacgccgataccagatacacccagaaattccagggcagagtgaccct |
| | sequence | gacagccgatagaagcgccagcacagcctacatggaactgagcagcctga |
| | | gaagcgaggataccgccgtgtactactgtggcagagatgccggcctggaata |
| | | ttacgccctggactattggggccagggcaccctggttacagtgtcctctgcctcta |
| | | caaagggcccctccgtttttccactggctcctagcagcaagagcacatctggtg |
| | | gaacagccgctctgggctgcctggtcaaggattactttcctgagcctgtgaccgt |
| | | gtcctggaatagcggagcactgacaagcggcgtgcacacatttccagccgtg |
| | | ctgcaaagcagcggcctgtactctctgtctagcgtggtcacagtgcctagctcta |
| | | gcctgggcacccagacctacatctgcaacgtgaaccacaagcctagcaaca |
| | | ccaaggtcgacaagagagtggaacccaagtcttgtggtggcggaggatctgg |
| | | cggaggcggatctgaagttcagcttgttgaatctggcggcggactggtgcaac |
| | | ctggcggatctctgaaactgtcttgtgccgcctccggcttcaccttcaatacctac |
| | | gccatgaactgggttcgacaagcctccggcaaaggactggaatgggtcgga |
| | | cggatcagaagcaagtacaacaactacgccacctactacgccgactccgtg |
| | | aaggacagattcaccatcagccgggacgactccaagagcaccctgtacctcc |
| | | agatgaactccctgaaaaccgaggacacagccgtctattattgcgtgcggcac |
| | | ggcaacttcggcaacagctatgtgtcttggtttgcctactggggacagggaacc |
| | | ctcgtgaccgtttcttcaggcggcggtggtagtggcggtggtggtagcggaggc |
| | | ggtggatcaggtggcggcggttctcaagctgtggtcacacaagagcccagcct |
| | | gacagtttctcctggcggaaccgtgacactgacctgtagatctagcaccggcg |
| | | cagtgaccaccagcaattacgctaactgggtgcagcagaagcccggccaag |
| | | ctcctagaggactgatcggaggcacaaacaagagagccccttggacaccag |
| | | ccagattttctggctctctgctgggcgataaggccgctcttacactgtctggcgca |
| | | cagcctgaagatgaggccgagtacttttgcgccctgtggtacagcaacctgtgg |
| | | gtgttcggcggaggaacaaagctgacagttcttggaggcggcggaagcgac |
| | | aagacccacacatgtcctccatgtcctgctccagaactgctgggagcccctag |
| | | cgttttcctgtttcctccaaagccaaaggacaccctgatgatcagcagaacccct |
| | | gaagtgacctgtgtggtggtggccgtgaagcacgaggacccagaagtgaagt |
| | | tcaattggtacgtggacggcgtggaagtgcacaacgccaagaccaagccta |
| | | gagaggaacagtacaacagcacctacagagtggtgtccgtgctgacagtgct |
| | | gcaccaggactggctgaacggcaaagagtacaagtgcaaggtgtccaaca |
| | | aggccctggccgctcctatcgagaaaaccatctctaaggccaagggccagcc |
| | | tcgggaacctcaagtgtgcactcttccacctagccgggaagagatgaccaag |
| | | aaccaggtgtcactgagctgcgccgtgaagggcttctacccttctgatatcgcc |
| | | gtggaatgggagagcaacggccagccagagaacaactacaagaccacac |
| | | ctcctgtgctggacagcgacggctcattcttcctggtgtctaagctgaccgtgga |
| | | caagagcagatggcagcagggcaacgtgttcagctgttctgtgatgcacgag |
| | | gccctgcacaaccactacacacagaagtccctgtctctgagccccggcaaa |
| 1122 | Anti-CD58 | sqqiygvvygnvtfhvpsnvplkevlwkkqkdkvaelensefrafssfknrvyl |
| | GADAPASK IgG1 | dtvsgsltiynltssdedeyemespnitdtmkfflyvlesggggsdkthtcppcp |
| | Heavy Chain | apellgapsvflfppkpkdtlmisrtpevtcvvvavkhedpevkfnwyvdgvev |
| | Amino acid | hnaktkpreeqynstyrvvsvltvlhqdwlngkeykckvsnkalaapiektisk |
| | sequence | akgqprepqvytlppcreemtknqvslwclvkgfypsdiavewesngqpen |
| | | nykttppvldsdgsfflyskltvdksrwqqgnvfscsvmhealhnhytqkslsls |
| | | pgk |
| 1123 | Anti-CD58 | tctcagcagatctatggcgtggtgtacggcaacgtgaccttccacgtgccaagc |
| | GADAPASK IgG1 | aacgtgcccctgaaagaggtgctctggaagaaacagaaagacaaggtggc |
| | Heavy Chain | cgagctggaaaacagcgagttcagagccttcagcagcttcaagaaccgggt |
| | Nucleic acid | gtacctggataccgtgtccggcagcctgaccatctacaatctgaccagcagcg |
| | sequence | acgaggacgagtacgagatggaaagccccaacatcaccgacaccatgaag |
| | | ttctttctgtacgtgctggaaagcggcggaggcggctctgataagacacacac |
| | | atgtcctccatgtcctgctccagaactgctgggagcccctagcgttttcctgtttcct |
| | | ccaaagccaaaggacaccctgatgatcagcagaacccctgaagtgacctgt |
| | | gtggtggtggccgtgaagcacgaagatcccgaagtgaagttcaattggtacgt |
| | | ggacggcgtggaagtgcacaacgccaagaccaagcctagagaggaacag |
| | | tacaacagcacctacagagtggtgtccgtgctgaccgtgctgcaccaggattg |
| | | gctgaacggcaaagagtacaagtgcaaggtgtccaacaaggccctggccgc |
| | | tcctatcgagaaaaccatctctaaggccaagggccagcctcgggaaccaca |
| | | ggtttacaccctgcctccatgccgggaagagatgaccaagaatcaggtgtccc |
| | | tgtggtgcctggtcaagggcttctacccttccgatatcgccgtggaatgggaga |
| | | gcaatggccagcctgagaacaactacaagaccacacctcctgtgctggaca |
| | | gcgacggctcattcttcctgtacagcaagctgacagtggacaagagcagatg |
| | | gcagcagggcaacgtgttcagctgttctgtgatgcacgaggccctgcacaacc |
| | | actacacccagaagtctctgtctctgagccccggcaaa |
| 1124 | Anti-CD19-CD3 | qvqlvqsgaevkkpgasvkvsckasgytfttywiqwvrqapgqrlewmgav |
| | LALA IgG1 | ypgdadtrytqkfqgrvtltadrsastaymelsslrsedtavyycgrdagleyyal |
| | Heavy Chain | dywgqgtlvtvssastkgpsvfplapsskstsggtaalgclvkdyfpepvtvsw |
| | Amino acid | nsgaltsgvhtfpavlqssglyslssvvtvpssslgtqtyicnvnhkpsntkvdkr |
| | sequence | vepkscggggsggggsevqlvesggglvqpggslklscaasgftfntyamn |
| | | wvrqasgkglewvgrirskynnyatyyadsvkdrftisrddskstlylqmnslkt |
| | | edtavyycvrhgnfgnsyvswfaywgqgtlvtvssggggsggggsggggsg |
| | | gggsqavvtqepsltvspggtvtltcrsstgavttsnyanwvqqkpgqaprglig |
| | | gtnkrapwtparfsgsllgdkaaltlsgaqpedeaeyfcalwysnlwvfgggtkl |
| | | tvlggggsdkthtcppcpapeaaggpsvflfppkpkdtlmisrtpevtcvvvdv |
| | | shedpevkfnwyvdgvevhnaktkpreeqynstyrvvsvltvlhqdwlngke |
| | | ykckvsnkalpapiektiskakgqprepqvctlppsreemtknqvslscavkgf |
| | | ypsdiavewesngqpennykttppvldsdgsfflvskltvdksrwqqgnvfsc |
| | | svmhealhnhytqkslslspgk |
| 1125 | Anti-CD19-CD3 | caggttcaactggttcagagcggagccgaagtgaagaaacctggggccagc |
| | LALA IgG1 | gtgaaggtgtcctgtaaagccagcggctacacctttaccacctactggattcagt |
| | Heavy Chain | gggtccgacaggcccctggacagagacttgaatggatgggagctgtgtaccc |
| | Nucleic acid | cggcgacgccgataccagatacacccagaaattccagggcagagtgaccct |
| | sequence | gacagccgatagaagcgccagcacagcctacatggaactgagcagcctga |
| | | gaagcgaggataccgccgtgtactactgtggcagagatgccggcctggaata |
| | | ttacgccctggactattggggccagggcaccctggttacagtgtcctctgcctcta |
| | | caaagggcccctccgtttttccactggctcctagcagcaagagcacatctggtg |
| | | gaacagccgctctgggctgcctggtcaaggattactttcctgagcctgtgaccgt |
| | | gtcctggaatagcggagcactgacaagcggcgtgcacacatttccagccgtg |
| | | ctgcaaagcagcggcctgtactctctgtctagcgtggtcacagtgcctagctcta |
| | | gcctgggcacccagacctacatctgcaacgtgaaccacaagcctagcaaca |
| | | ccaaggtcgacaagagagtggaacccaagtcttgtggtggcggaggatctgg |
| | | cggaggcggatctgaagttcagcttgttgaatctggcggcggactggtgcaac |
| | | ctggcggatctctgaaactgtcttgtgccgcctccggcttcaccttcaatacctac |
| | | gccatgaactgggttcgacaagcctccggcaaaggactggaatgggtcgga |
| | | cggatcagaagcaagtacaacaactacgccacctactacgccgactccgtg |
| | | aaggacagattcaccatcagccgggacgactccaagagcaccctgtacctcc |
| | | agatgaactccctgaaaaccgaggacacagccgtctattattgcgtgcggcac |
| | | ggcaacttcggcaacagctatgtgtcttggtttgcctactggggacagggaacc |
| | | ctcgtgaccgtttcttcaggcggcggtggtagtggcggtggtggtagcggaggc |
| | | ggtggatcaggtggcggcggttctcaagctgtggtcacacaagagcccagcct |
| | | gacagtttctcctggcggaaccgtgacactgacctgtagatctagcaccggcg |
| | | cagtgaccaccagcaattacgctaactgggtgcagcagaagcccggccaag |
| | | ctcctagaggactgatcggaggcacaaacaagagagccccttggacaccag |
| | | ccagattttctggctctctgctgggcgataaggccgctcttacactgtctggcgca |
| | | cagcctgaagatgaggccgagtacttttgcgccctgtggtacagcaacctgtgg |
| | | gtgttcggcggaggaacaaagctgacagttcttggaggcggcggaagcgac |
| | | aagacccacacatgtcctccatgtcctgctccagaagctgctggcggaccctc |
| | | cgtgtttctgttccctccaaagccaaaggacaccctgatgatcagcagaacccc |
| | | tgaagtgacctgcgtggtggtggatgtgtctcacgaggacccagaagtgaagtt |
| | | caattggtacgtggacggcgtggaagtgcacaacgccaagaccaagcctag |
| | | agaggaacagtacaacagcacctacagagtggtgtccgtgctgacagtgctg |
| | | caccaggactggctgaacggcaaagagtacaagtgcaaggtgtccaacaa |
| | | ggccctgcctgctcctatcgagaaaaccatcagcaaggccaagggccagcct |
| | | agggaacctcaagtgtgcactctgcctccaagccgggaagagatgaccaag |
| | | aatcaggtgtccctgagctgcgccgtgaagggcttttacccttccgatatcgccg |
| | | tggaatgggagagcaatggccagccagagaacaactacaagaccacacct |
| | | cctgtgctggacagcgacggctcattcttcctggtgtctaagctgaccgtggaca |
| | | agagcagatggcagcagggcaacgtgttcagctgttctgtgatgcacgaggc |
| | | cctgcacaaccactacacacagaagtccctgtctctgagccccggcaaa |
| 1126 | Anti-CD58 | sqqiygvvygnvtfhvpsnvplkevlwkkqkdkvaelensefrafssfknrvyl |
| | LALA IgG1 | dtvsgsltiynltssdedeyemespnitdtmkfflyvlesggggsdkthtcppcp |
| | Heavy Chain | apeaaggpsvflfppkpkdtlmisrtpevtcvvvdvshedpevkfnwyvdgv |
| | Amino acid | evhnaktkpreeqynstyrvvsvltvlhqdwlngkeykckvsnkalpapiekti |
| | sequence | skakgqprepqvytlppcreemtknqvslwclvkgfypsdiavewesngqp |
| | | ennykttppvldsdgsfflyskltvdksrwqqgnvfscsvmhealhnhytqksl |
| | | slspgk |
| 1314 | Anti-CD58 | tctcagcagatctatggcgtggtgtacggcaacgtgaccttccacgtgccaagc |
| | LALA IgG1 | aacgtgcccctgaaagaggtgctctggaagaaacagaaagacaaggtggc |
| | Heavy Chain | cgagctggaaaacagcgagttcagagccttcagcagcttcaagaaccgggt |
| | Nucleic acid | gtacctggataccgtgtccggcagcctgaccatctacaatctgaccagcagcg |
| | sequence | acgaggacgagtacgagatggaaagccccaacatcaccgacaccatgaag |
| | | ttctttctgtacgtgctggaaagcggcggaggcggctctgataagacacacac |
| | | atgtcctccatgtcctgctccagaagcagctggcggaccctctgttttcctgtttcc |
| | | acctaagccaaaggacaccctgatgatcagcagaacccctgaagtgacctg |
| | | cgtggtggtggatgtgtctcacgaggaccccgaagtgaagttcaattggtacgt |
| | | ggacggcgtggaagtgcacaacgccaagaccaagcctagagaggaacag |
| | | tacaacagcacctacagagtggtgtccgtgctgaccgtgctgcaccaggattg |
| | | gctgaacggcaaagagtacaagtgcaaggtgtccaacaaggccctgcctgct |
| | | cctatcgagaaaaccatcagcaaggccaagggccagccaagagaacccc |
| | | aggtttacaccctgcctccatgccgggaagagatgaccaagaatcaggtgtcc |
| | | ctgtggtgcctggtcaagggcttctacccttccgatatcgccgtggaatgggaga |
| | | gcaatggccagcctgagaacaactacaagaccacacctcctgtgctggaca |
| | | gcgacggctcattcttcctgtacagcaagctgacagtggacaagagcagatg |
| | | gcagcagggcaacgtgttcagctgttctgtgatgcacgaggccctgcacaacc |
| | | actacacccagaagtctctgtctctgagccccggcaaa |
| 1127 | Anti-CD19-CD3 | qvqlvqsgaevkkpgasvkvsckasgytfttywiqwvrqapgqrlewmgav |
| | LALASKPA IgG1 | ypgdadtrytqkfqgrvtltadrsastaymelsslrsedtavyycgrdagleyyal |
| | Heavy Chain | dywgqgtlvtvssastkgpsvfplapsskstsggtaalgclvkdyfpepvtvsw |
| | Amino acid | nsgaltsgvhtfpavlqssglyslssvvtvpssslgtqtyicnvnhkpsntkvdkr |
| | sequence | vepkscggggsggggsevqlvesggglvqpggslklscaasgftfntyamn |
| | | wvrqasgkglewvgrirskynnyatyyadsvkdrftisrddskstlylqmnslkt |
| | | edtavyycvrhgnfgnsyvswfaywgqgtlvtvssggggsggggsggggsg |
| | | gggsqavvtqepsltvspggtvtltcrsstgavttsnyanwvqqkpgqaprglig |
| | | gtnkrapwtparfsgsllgdkaaltlsgaqpedeaeyfcalwysnlwvfgggtkl |
| | | tvlggggsdkthtcppcpapeaaggpsvflfppkpkdtlmisrtpevtcvvvdv |
| | | khedpevkfnwyvdgvevhnaktkpreeqynstyrvvsvltvlhqdwlngke |
| | | ykckvsnkalaapiektiskakgqprepqvctlppsreemtknqvslscavkgf |
| | | ypsdiavewesngqpennykttppvldsdgsfflvskltvdksrwqqgnvfsc |
| | | svmhealhnhytqkslslspgk |
| 1128 | Anti-CD19-CD3 | caggttcaactggttcagagcggagccgaagtgaagaaacctggggccagc |
| | LALASKPA IgG1 | gtgaaggtgtcctgtaaagccagcggctacacctttaccacctactggattcagt |
| | Heavy Chain | gggtccgacaggcccctggacagagacttgaatggatgggagctgtgtaccc |
| | Nucleic acid | cggcgacgccgataccagatacacccagaaattccagggcagagtgaccct |
| | sequence | gacagccgatagaagcgccagcacagcctacatggaactgagcagcctga |
| | | gaagcgaggataccgccgtgtactactgtggcagagatgccggcctggaata |
| | | ttacgccctggactattggggccagggcaccctggttacagtgtcctctgcctcta |
| | | caaagggcccctccgtttttccactggctcctagcagcaagagcacatctggtg |
| | | gaacagccgctctgggctgcctggtcaaggattactttcctgagcctgtgaccgt |
| | | gtcctggaatagcggagcactgacaagcggcgtgcacacatttccagccgtg |
| | | ctgcaaagcagcggcctgtactctctgtctagcgtggtcacagtgcctagctcta |
| | | gcctgggcacccagacctacatctgcaacgtgaaccacaagcctagcaaca |
| | | ccaaggtcgacaagagagtggaacccaagtcttgtggtggcggaggatctgg |
| | | cggaggcggatctgaagttcagcttgttgaatctggcggcggactggtgcaac |
| | | ctggcggatctctgaaactgtcttgtgccgcctccggcttcaccttcaatacctac |
| | | gccatgaactgggttcgacaagcctccggcaaaggactggaatgggtcgga |
| | | cggatcagaagcaagtacaacaactacgccacctactacgccgactccgtg |
| | | aaggacagattcaccatcagccgggacgactccaagagcaccctgtacctcc |
| | | agatgaactccctgaaaaccgaggacacagccgtctattattgcgtgcggcac |
| | | ggcaacttcggcaacagctatgtgtcttggtttgcctactggggacagggaacc |
| | | ctcgtgaccgtttcttcaggcggcggtggtagtggcggtggtggtagcggaggc |
| | | ggtggatcaggtggcggcggttctcaagctgtggtcacacaagagcccagcct |
| | | gacagtttctcctggcggaaccgtgacactgacctgtagatctagcaccggcg |
| | | cagtgaccaccagcaattacgctaactgggtgcagcagaagcccggccaag |
| | | ctcctagaggactgatcggaggcacaaacaagagagccccttggacaccag |
| | | ccagattttctggctctctgctgggcgataaggccgctcttacactgtctggcgca |
| | | cagcctgaagatgaggccgagtacttttgcgccctgtggtacagcaacctgtgg |
| | | gtgttcggcggaggaacaaagctgacagttcttggaggcggcggaagcgac |
| | | aagacccacacatgtcctccatgtcctgctccagaagctgctggcggaccctc |
| | | cgtgtttctgttccctccaaagccaaaggacaccctgatgatcagcagaacccc |
| | | tgaagtgacctgcgtggtggtggatgtgaagcacgaggacccagaagtgaa |
| | | gttcaattggtacgtggacggcgtggaagtgcacaacgccaagaccaagcct |
| | | agagaggaacagtacaacagcacctacagagtggtgtccgtgctgacagtg |
| | | ctgcaccaggactggctgaacggcaaagagtacaagtgcaaggtgtccaac |
| | | aaggccctggccgctcctatcgagaaaaccatctctaaggccaagggccag |
| | | cctcgggaacctcaagtgtgcactcttccacctagccgggaagagatgacca |
| | | agaaccaggtgtcactgagctgcgccgtgaagggcttctacccttctgatatcg |
| | | ccgtggaatgggagagcaacggccagccagagaacaactacaagaccac |
| | | acctcctgtgctggacagcgacggctcattcttcctggtgtctaagctgaccgtg |
| | | gacaagagcagatggcagcagggcaacgtgttcagctgtagcgtgatgcac |
| | | gaggccctgcacaaccactacacacagaagtccctgtctctgagccccggca |
| | | aa |
| 1129 | Anti-CD58 | sqqiygvvygnvtfhvpsnvplkevlwkkqkdkvaelensefrafssfknrvyl |
| | LALASKPA IgG1 | dtvsgsltiynltssdedeyemespnitdtmkfflyvlesggggsdkthtcppcp |
| | Heavy Chain | apeaaggpsvflfppkpkdtlmisrtpevtcvvvdvkhedpevkfnwyvdgv |
| | Amino acid | evhnaktkpreeqynstyrvvsvltvlhqdwlngkeykckvsnkalaapiekti |
| | sequence | skakgqprepqvytlppcreemtknqvslwclvkgfypsdiavewesngqp |
| | | ennykttppvldsdgsfflyskltvdksrwqqgnvfscsvmhealhnhytqksl |
| | | slspgk |
| 1130 | Anti-CD58 | tctcagcagatctatggcgtggtgtacggcaacgtgaccttccacgtgccaagc |
| | LALASKPA IgG1 | aacgtgcccctgaaagaggtgctctggaagaaacagaaagacaaggtggc |
| | Heavy Chain | cgagctggaaaacagcgagttcagagccttcagcagcttcaagaaccgggt |
| | Nucleic acid | gtacctggataccgtgtccggcagcctgaccatctacaatctgaccagcagcg |
| | sequence | acgaggacgagtacgagatggaaagccccaacatcaccgacaccatgaag |
| | | ttctttctgtacgtgctggaaagcggcggaggcggctctgataagacacacac |
| | | atgtcctccatgtcctgctccagaagcagctggcggaccctctgttttcctgtttcc |
| | | acctaagccaaaggacaccctgatgatcagcagaacccctgaagtgacctg |
| | | cgtggtggtggatgtgaagcacgaggaccccgaagtgaagttcaattggtacg |
| | | tggacggcgtggaagtgcacaacgccaagaccaagcctagagaggaaca |
| | | gtacaacagcacctacagagtggtgtccgtgctgaccgtgctgcaccaggatt |
| | | ggctgaacggcaaagagtacaagtgcaaggtgtccaacaaggccctggcc |
| | | gctcctatcgagaaaaccatctctaaggccaagggccagcctcgggaacca |
| | | caggtttacaccctgcctccatgccgggaagagatgaccaagaatcaggtgtc |
| | | cctgtggtgcctggtcaagggcttctacccttccgatatcgccgtggaatgggag |
| | | agcaatggccagcctgagaacaactacaagaccacacctcctgtgctggac |
| | | agcgacggctcattcttcctgtacagcaagctgacagtggacaagagcagat |
| | | ggcagcagggcaacgtgttcagctgtagcgtgatgcacgaggccctgcacaa |
| | | ccactacacccagaagtctctgtctctgagccccggcaaa |

### 8.38. Example 38: Biophysical Properties of Modified Antibodies: SPR-Binding of Modified Antibodies of Example 37 to Human Fc Gamma Receptor 1A

[0898] Surface plasmon resonance (SPR) experiments were performed to analyze the interaction of human activating receptor FcγR1A towards WT and antibody-Fc variants. Binding kinetics and their relative binding affinities were explored. The binding affinity is an important characteristic of an interaction between an antibody and an antigen. The equilibrium dissociation constant (K_{D}) defines how strong the interaction is and therefore how much antibody-antigen complex is formed at equilibrium. The knowledge of the antibody characteristics is not only essential during selection of the best therapeutic antibody candidate, but also important to understand the in vivo behavior and potentially predict cellular immune responses. The aim is to generate antibody variants with no or low binding to Fc gamma receptor to reduce or eliminate effector function in hope of improving the safety of monoclonal antibody therapeutics.

[0899] All SPR buffers were prepared using deionized water. The samples were prepared in running buffer PBS pH 7.4 with 0.005% Tween-20. SPR measurements were measured on a Biacore T200 (GE-Healthcare Life Sciences) controlled by Biacore T200 control software version 2.0.1.

[0900] Surface plasmon resonance was conducted using a Biacore T200 to assess binding affinity of antibody WT and variants to human FcγR1A.

[0901] The antibodies were covalently immobilized on a CM5 sensor chip whereas Fc gamma receptor 1A served as analyte in solution (FIG. 38). Antibodies were diluted in 10 mM sodium acetate pH 4 and immobilized at a density of approximately 950 resonance units (RU) on the CM5 sensor chip applying a standard amine coupling procedure. Flow cell 1 was blank immobilized to serve as a reference. The kinetic binding data were collected by subsequent injections of 1:2 dilution series of the human Fc gamma receptor 1A on all flow cells at a flow rate of 30 μl/min and at a temperature of 25° C. The Fc gamma receptor was diluted in the running buffer at concentrations ranging from 0.2 nM to 25 nM. The chip surface was regenerated using 20 mM glycine pH 2.0 solution after each measuring cycle. Zero concentration samples (blank runs) were measured to allow double-referencing during data evaluation.

[0902] Data were evaluated using the Biacore T200 evaluation software. The raw data were double referenced, i.e. the response of the measuring flow cell was corrected for the response of the reference flow cell, and in a second step the response of a blank injection was subtracted. Then the sensorgrams were fitted by applying a 1:1 kinetic binding model to calculate dissociation equilibrium constants. In addition, the maximum response reached during the experiment was monitored. Maximum response describes the binding capacity of the surface in terms of the response at saturation.

[0903] The maximum response values summarizing these interactions are given in Table 35.

[0904] The SPR Biacore binding sensorgrams for each variant towards FcγR1A were depicted in FIG. 41.

[0905] All variants inhibit the binding to Fc gamma receptors compare to WT as low residual binding was measured.

TABLE 35
Maximum responses of WT-Fc and variants towards
human FcγRIA determined by surface plasmon
resonance

| | Maximum response at 25nM hFcγRIA |
|---|---|
| Fc | (RU) |
| WT | 138 |
| DANAPA | 0 |
| GADAPASK | 0 |
| LALA | 44 |
| LALASKPA | 0 |

### Differential Scanning Calorimetry- Melting Temperature of Modified Antibodies

[0906] The thermal stability of engineered antibodies CH2 domains were compared using calorimetric measurements as shown in Table 36. Calorimetric measurements were carried out on a differential scanning micro calorimeter (Nano DSC, TA instruments). The cell volume was 1 ml and the heating rate was 1° C./min. All proteins were used at a concentration of 1 mg/mi in PBS (pH 7.4). The molar heat capacity of each protein was estimated by comparison with duplicate samples containing identical buffer from which the protein had been omitted. The partial molar heat capacities and melting curves were analyzed using standard procedure. Thermograms were baseline corrected and concentration normalized. The silent version LALASKPA (68° C.) shows significantly better Tm compared to DANAPA (57° C.).

TABLE 36
Melting temperatures of WT-Fc and variants

| Fc | Melting temperature (Tm) of CH2 domain |
|---|---|
| WT | 68 |
| DANAPA | 57 |
| GADAPASK | 59 |
| LALA | 68 |
| LALASKPA | 68 |

### Aggregation Propensity Post Capture of Fc Variants

[0907] Size exclusion chromatography measurements were performed to evaluate the aggregation propensity (% HMW) of WT and Fc modified derivatives. The produced and purified antibodies were applied to an analytical size exclusion chromatography column (SEC 200, GE Healthcare), equilibrated with PBS buffer pH 7.4. Results are summarized in Table 37.

TABLE 37
Higher molecular weight content (%) of antibodies

| Fc | (%) higher molecular weight |
|---|---|
| WT | 16.3 |
| DANAPA | 22.7 |
| GADAPASK | 16.1 |
| LALA | 18.1 |
| LALASKPA | 18.9 |

### 8.39. Example 39: Anti-CD3 NFAT Signalling Assay

[0908] Jurkat reporter gene assay (RGA) for the nuclear factor of activated T-cells (NFAT) pathway was performed using Jurkat NFAT luciferized (JNL) cells and THP-1 cells (ATCC, TIB202). THP-1 cells express FcγRI, FcγRII, and FcγRIII. Cells were co-incubated for 6 hours at 37° C., 5% CO2 at a 5:1 effector to tumor cell ratio with each sample at the various concentrations depicted. An equal volume of ONE-Glo™ reagent (Promega, E6120) was added to the culture volume. Plate was shaken for 2 minutes, then incubated for an additional 8 minutes protected from light. Luciferase activity was quantitated on the Biotek Synergy HT plate reader. Data were analyzed and fit to a 4 parameter-logistic curve using GraphPad Prism.

[0909] In summary, WT showed the greatest NFAT activity. All silencing mutation sets showed significantly dampened NFAT activation. In the RGA, performed without IFNg (FIG. 42), all silencing mutation sets showed comparable T-cell activation with the exception of DANAPA.

### 8.40. Example 40: CD31hi TSP1 Variant

[0910] A CD3hi TSP1 variant comprising knob-into-hole mutations in the opposite Fc regions as compared to CD3hi TSP1 was produced. The amino acid sequences of the variant are set forth in Table 38.

TABLE 38

| | | SEQ |
|---|---|---|
| Chain | | ID |
| Description | Amino Acid Sequence | NO |
| First Half | QVQLVQSGAEVKKPGASVKVSCKASGYTFTTYWIQWVRQAPGQRLE | 1131 |
| Antibody | WMGAVYPGDADTRYTQKFQGRVTLTADRSASTAYMELSSLRSEDTA | |
| Heavy | VYYCGRDAGLEYYALDYWGQGTLVTVSSASTKGPSVFPLAPSSKST | |
| Chain | SGGTAALGCLVKDYFPEPVTVSWNSGALTSGVHTFPAVLQSSGLYSL | |
| (includes Fc | SSVVTVPSSSLGTQTYICNVNHKPSNTKVDKRVEPKSCGGGGSGGG | |
| sequence) | GSEVQLVESGGGLVQPGGSLKLSCAASGFTFNTYAMNWVRQASGK | |
| | GLEWVGRIRSKYNNYATYYADSVKDRFTISRDDSKSTLYLQMNSLKT | |
| | EDTAVYYCVRHGNFGNSYVSWFAYWGQGTLVTVSSGGGGSGGGG | |
| | SGGGGSGGGGSQAVVTQEPSLTVSPGGTVTLTCRSSTGAVTTSNYA | |
| | NWVQQKPGQAPRGLIGGTNKRAPWTPARFSGSLLGDKAALTLSGAQ | |
| | PEDEAEYFCALWYSNLWVFGGGTKLTVLGGGGSDKTHTCPPCPAPE | |
| | LLGGPSVFLFPPKPKDTLMISRTPEVTCVVVAVSHEDPEVKFNWYVD | |
| | GVEVHNAKTKPREEQYASTYRVVSVLTVLHQDWLNGKEYKCKVSNK | |
| | ALAAPIEKTISKAKGQPREPQVYTLPPCREEMTKNQVSLWCLVKGFY | |
| | PSDIAVEWESNGQPENNYKTTPPVLDSDGSFFLYSKLTVDKSRWQQ | |
| | GNVFSCSVMHEALHNHYTQKSLSLSPGK | |
| First Half | EIVMTQSPATLSVSPGERATLSCRASQDVGTAVAWYQQKPGQAPRL | 1132 |
| Antibody | LIYWASTRHTGIPARFSGSGSGTEFTLTISSLQSEDFAVYFCQQYANF | |
| Light Chain | PLYTFGQGTKLEIKRTVAAPSVFIFPPSDEQLKSGTASVVCLLNNFYP | |
| | REAKVQWKVDNALQSGNSQESVTEQDSKDSTYSLSSTLTLSKADYE | |
| | KHKVYACEVTHQGLSSPVTKSFNRGEC | |
| Second Half | SQQIYGVVYGNVTFHVPSNVPLKEVLWKKQKDKVAELENSEFRAFSS | 1133 |
| Antibody | FKNRVYLDTVSGSLTIYNLTSSDEDEYEMESPNITDTMKFFLYVLESG | |
| (includes Fc | GGGSDKTHTCPPCPAPELLGGPSVFLFPPKPKDTLMISRTPEVTCVV | |
| sequence) | VAVSHEDPEVKFNWYVDGVEVHNAKTKPREEQYASTYRVVSVLTVL | |
| | HQDWLNGKEYKCKVSNKALAAPIEKTISKAKGQPREPQVCTLPPSRE | |
| | EMTKNQVSLSCAVKGFYPSDIAVEWESNGQPENNYKTTPPVLDSDG | |
| | SFFLVSKLTVDKSRWQQGNVFSCSVMHEALHNHYTQKSLSLSPGK | |

### 8.41. Example 41: CD3hi TSP1 Variants

[0911] Additional Fc variants of CD3hi TSP1 are designed, and expressed and purified according to the methods described in Example 37. Amino acid sequences of the variants are set forth in Table 39.

TABLE 39
Exemplary TBM sequences

| SEQ ID | | |
|---|---|---|
| No | Description | Sequence |
| 1110 | Anti-CD19 light | eivmtqspatlsvspgeratlscrasqdvgtavawyqqkpgqaprlliywastr |
| | chain | htgiparfsgsgsgteftltisslqsedfavyfcqqyanfplytfgqgtkleikrtvaa |
| | Amino acid | psvfifppsdeqlksgtasvvcllnnfypreakvqwkvdnalqsgnsqesvteq |
| | sequence | dskdstyslsstltlskadyekhkvyacevthqglsspvtksfnrgec |
| 1134 | Anti-CD19-CD3 | qvqlvqsgaevkkpgasvkvsckasgytfttywiqwvrqapgqrlewmgav |
| | LALAGA IgG1 | ypgdadtrytqkfqgrvtltadrsastaymelsslrsedtavyycgrdagleyyal |
| | Heavy Chain | dywgqgtlvtvssastkgpsvfplapsskstsggtaalgclvkdyfpepvtvsw |
| | Amino acid | nsgaltsgvhtfpavlqssglyslssvvtvpssslgtqtyicnvnhkpsntkvdkr |
| | sequence | vepkscggggsggggsevqlvesggglvqpggslklscaasgftfntyamn |
| | | wvrqasgkglewvgrirskynnyatyyadsvkdrftisrddskstlylqmnslkt |
| | | edtavyycvrhgnfgnsyvswfaywgqgtlvtvssggggsggggsggggsg |
| | | gggsqavvtqepsltvspggtvtltcrsstgavttsnyanwvqqkpgqaprglig |
| | | gtnkrapwtparfsgsllgdkaaltlsgaqpedeaeyfcalwysnlwvfgggtkl |
| | | tvlggggsdkthtcppcpapeaagapsvflfppkpkdtlmisrtpevtcvvvdv |
| | | shedpevkfnwyvdgvevhnaktkpreeqynstyrvvsvltvlhqdwlngke |
| | | ykckvsnkalpapiektiskakgqprepqvctlppsreemtknqvslscavkgf |
| | | ypsdiavewesngqpennykttppvldsdgsfflvskltvdksrwqqgnvfsc |
| | | svmhealhnhytqkslslspgk |
| 1135 | Anti-CD58 | sqqiygvvygnvtfhvpsnvplkevlwkkqkdkvaelensefrafssfknrvyl |
| | LALAGA IgG1 | dtvsgsltiynltssdedeyemespnitdtmkfflyvlesggggsdkthtcppcp |
| | Heavy Chain | apeaagapsvflfppkpkdtlmisrtpevtcvvvdvshedpevkfnwyvdgv |
| | Amino acid | evhnaktkpreeqynstyrvvsvltvlhqdwlngkeykckvsnkalpapiekti |
| | sequence | skakgqprepqvytlppcreemtknqvslwclvkgfypsdiavewesngqp |
| | | ennykttppvldsdgsfflyskltvdksrwqqgnvfscsvmhealhnhytqksl |
| | | slspgk |
| 1136 | Anti-CD19-CD3 | qvqlvqsgaevkkpgasvkvsckasgytfttywiqwvrqapgqrlewmgav |
| | DAPASK IgG1 | ypgdadtrytqkfqgrvtltadrsastaymelsslrsedtavyycgrdagleyyal |
| | Heavy Chain | dywgqgtlvtvssastkgpsvfplapsskstsggtaalgclvkdyfpepvtvsw |
| | Amino acid | nsgaltsgvhtfpavlqssglyslssvvtvpssslgtqtyicnvnhkpsntkvdkr |
| | sequence | vepkscggggsggggsevqlvesggglvqpggslklscaasgftfntyamn |
| | | wvrqasgkglewvgrirskynnyatyyadsvkdrftisrddskstlylqmnslkt |
| | | edtavyycvrhgnfgnsyvswfaywgqgtlvtvssggggsggggsggggsg |
| | | gggsqavvtqepsltvspggtvtltcrsstgavttsnyanwvqqkpgqaprglig |
| | | gtnkrapwtparfsgsllgdkaaltlsgaqpedeaeyfcalwysnlwvfgggtkl |
| | | tvlggggsdkthtcppcpapellggpsvflfppkpkdtlmisrtpevtcvvvavk |
| | | hedpevkfnwyvdgvevhnaktkpreeqynstyrvvsvltvlhqdwlngkey |
| | | kckvsnkalaapiektiskakgqprepqvctlppsreemtknqvslscavkgfy |
| | | psdiavewesngqpennykttppvldsdgsfflvskltvdksrwqqgnvfscs |
| | | vmhealhnhytqkslslspgk |
| 1137 | Anti-CD58 | sqqiygvvygnvtfhvpsnvplkevlwkkqkdkvaelensefrafssfknrvyl |
| | DAPASK IgG1 | dtvsgsltiynltssdedeyemespnitdtmkfflyvlesggggsdkthtcppcp |
| | Heavy Chain | apellggpsvflfppkpkdtlmisrtpevtcvvvavkhedpevkfnwyvdgvev |
| | Amino acid | hnaktkpreeqynstyrvvsvltvlhqdwlngkeykckvsnkalaapiektisk |
| | sequence | akgqprepqvytlppcreemtknqvslwclvkgfypsdiavewesngqpen |
| | | nykttppvldsdgsfflyskltvdksrwqqgnvfscsvmhealhnhytqkslsls |
| | | pgk |
| 1138 | Anti-CD19-CD3 | qvqlvqsgaevkkpgasvkvsckasgytfttywiqwvrqapgqrlewmgav |
| | GADAPA IgG1 | ypgdadtrytqkfqgrvtltadrsastaymelsslrsedtavyycgrdagleyyal |
| | Heavy Chain | dywgqgtlvtvssastkgpsvfplapsskstsggtaalgclvkdyfpepvtvsw |
| | Amino acid | nsgaltsgvhtfpavlqssglyslssvvtvpssslgtqtyicnvnhkpsntkvdkr |
| | sequence | vepkscggggggggsevqlvesggglvqpggslklscaasgftfntyamn |
| | | wvrqasgkglewvgrirskynnyatyyadsvkdrftisrddskstlylqmnslkt |
| | | edtavyycvrhgnfgnsyvswfaywgqgtlvtvssggggsggggsggggsg |
| | | gggsqavvtqepsltvspggtvtltcrsstgavttsnyanwvqqkpgqaprglig |
| | | gtnkrapwtparfsgsllgdkaaltlsgaqpedeaeyfcalwysnlwvfgggtkl |
| | | tvlggggsdkthtcppcpapellgapsvflfppkpkdtlmisrtpevtcvvvavs |
| | | hedpevkfnwyvdgvevhnaktkpreeqynstyrvvsvltvlhqdwlngkey |
| | | kckvsnkalaapiektiskakgqprepqvctlppsreemtknqvslscavkgfy |
| | | psdiavewesngqpennykttppvldsdgsfflvskltvdksrwqqgnvfscs |
| | | vmhealhnhytqkslslspgk |
| 1139 | Anti-CD58 | sqqiygvvygnvtfhvpsnvplkevlwkkqkdkvaelensefrafssfknrvyl |
| | GADAPA IgG1 | dtvsgsltiynltssdedeyemespnitdtmkfflyvlesggggsdkthtcppcp |
| | Heavy Chain | apellgapsvflfppkpkdtlmisrtpevtcvvvavshedpevkfnwyvdgvev |
| | Amino acid | hnaktkpreeqynstyrvvsvltvlhqdwlngkeykckvsnkalaapiektisk |
| | sequence | akgqprepqvytlppcreemtknqvslwclvkgfypsdiavewesngqpen |
| | | nykttppvldsdgsfflyskltvdksrwqqgnvfscsvmhealhnhytqkslsls |
| | | pgk |
| 1140 | Anti-CD19-CD3 | qvqlvqsgaevkkpgasvkvsckasgytfttywiqwvrqapgqrlewmgav |
| | LALAPG IgG1 | ypgdadtrytqkfqgrvtltadrsastaymelsslrsedtavyycgrdagleyyal |
| | Heavy Chain | dywgqgtlvtvssastkgpsvfplapsskstsggtaalgclvkdyfpepvtvsw |
| | Amino acid | nsgaltsgvhtfpavlqssglyslssvvtvpssslgtqtyicnvnhkpsntkvdkr |
| | sequence | vepkscggggsggggsevalvesggglvqpggslklscaasgftfntyamn |
| | | wvrqasgkglewvgrirskynnyatyyadsvkdrftisrddskstlylqmnslkt |
| | | edtavyycvrhgnfgnsyvswfaywgqgtlvtvssggggsggggsggggsg |
| | | gggsqavvtqepsltvspggtvtltcrsstgavttsnyanwvqqkpgqaprglig |
| | | gtnkrapwtparfsgsllgdkaaltlsgaqpedeaeyfcalwysnlwvfgggtkl |
| | | tvlggggsdkthtcppcpapeaaggpsvflfppkpkdtlmisrtpevtcvvvdv |
| | | shedpevkfnwyvdgvevhnaktkpreeqynstyrvvsvltvlhqdwlngke |
| | | ykckvsnkalgapiektiskakgqprepqvctlppsreemtknqvslscavkgf |
| | | ypsdiavewesngqpennykttppvldsdgsfflvskltvdksrwqqgnvfsc |
| | | svmhealhnhytqkslslspgk |
| 1141 | Anti-CD58 | sqqiygvvygnvtfhvpsnvplkevlwkkqkdkvaelensefrafssfknrvyl |
| | LALAPG IgG1 | dtvsgsltiynltssdedeyemespnitdtmkfflyvlesggggsdkthtcppcp |
| | Heavy Chain | apeaaggpsvflfppkpkdtlmisrtpevtcvvvdvshedpevkfnwyvdgv |
| | Amino acid | evhnaktkpreeqynstyrvvsvltvlhqdwlngkeykckvsnkalgapiekti |
| | sequence | skakgqprepqvytlppcreemtknqvslwclvkgfypsdiavewesngqp |
| | | ennykttppvldsdgsfflyskltvdksrwqqgnvfscsvmhealhnhytqksl |
| | | slspgk |
| 1142 | Anti-CD19-CD3 | qvqlvqsgaevkkpgasvkvsckasgytfttywiqwvrqapgqrlewmgav |
| | LALAPA IgG1 | ypgdadtrytqkfqgrvtltadrsastaymelsslrsedtavyycgrdagleyyal |
| | Heavy Chain | dywgqgtlvtvssastkgpsvfplapsskstsggtaalgclvkdyfpepvtvsw |
| | Amino acid | nsgaltsgvhtfpavlqssglyslssvvtvpssslgtqtyicnvnhkpsntkvdkr |
| | sequence | vepkscggggsggggsevalvesggglvqpggslklscaasgftfntyamn |
| | | wvrqasgkglewvgrirskynnyatyyadsvkdrftisrddskstlylqmnslkt |
| | | edtavyycvrhgnfgnsyvswfaywgqgtlvtvssggggsggggsggggsg |
| | | gggsqavvtqepsltvspggtvtltcrsstgavttsnyanwvqqkpgqaprglig |
| | | gtnkrapwtparfsgsllgdkaaltlsgaqpedeaeyfcalwysnlwvfgggtkl |
| | | tvlggggsdkthtcppcpapeaaggpsvflfppkpkdtlmisrtpevtcvvvdv |
| | | shedpevkfnwyvdgvevhnaktkpreeqynstyrvvsvltvlhqdwlngke |
| | | ykckvsnkalaapiektiskakgqprepqvctlppsreemtknqvslscavkgf |
| | | ypsdiavewesngqpennykttppvldsdgsfflvskltvdksrwqqgnvfsc |
| | | svmhealhnhytqkslslspgk |
| 1143 | Anti-CD58 | sqqiygvvygnvtfhvpsnvplkevlwkkqkdkvaelensefrafssfknrvyl |
| | LALAPA IgG1 | dtvsgsltiynltssdedeyemespnitdtmkfflyvlesggggsdkthtcppcp |
| | Heavy Chain | apeaaggpsvflfppkpkdtlmisrtpevtcvvvdvshedpevkfnwyvdgv |
| | Amino acid | evhnaktkpreeqynstyrvvsvltvlhqdwlngkeykckvsnkalaapiekti |
| | sequence | skakgqprepqvytlppcreemtknqvslwclvkgfypsdiavewesngqp |
| | | ennykttppvldsdgsfflyskltvdksrwqqgnvfscsvmhealhnhytqksl |
| | | slspgk |

### 8.42. Example 42: Depletion of Normal B Cells by Ianalumab in Mouse

[0912] The effect of ianalumab on healthy B-cell levels in mice was evaluated in a repeat dose toxicity study.

### 8.42.1. Materials and Methods

[0913] CD-1 mice were administered 0 mg/kg or 100 mg/kg of ianalumab by intravenous administration weekly for 13 weeks, followed by an 11 week recovery period.

### 8.42.2. Results

[0914] In CD-1 mice administered 100 mg/kg of ianalumab, 70-90% of mature B cell depletion was observed. B cell levels recovered during the recovery period.

### 8.43. Example 43: Depletion of Normal B Cells by Ianalumab in Cynomolgus Monkey

[0915] A rising single i.v. dose range finding (DRF), toxicity and TK/PD study and three repeated dose toxicity studies were performed with ianalumab in cynomolgus monkeys. B-cell levels were evaluated in the studies.

[0916] In the single dose study, ianalumab at doses of 0.4 mg/kg and higher induced depletion of B cells. lanalumab was well tolerated.

[0917] Across three repeated dose studies, B cell depletion was observed at all dose levels.

[0918] Taken together, the mouse and cynomolgus monkey studies show that ianalumab depletes healthy B-cells in vivo. A similar effect of ianalumab on healthy B-cell cells in human is expected.

### 8.44. Example 44: In-Vitro Cytokine Release from B Cell Depleted PBMC-Karpas 422 or T Cell-Karpas 422 Co-Cultures with B Cell Titration

[0919] The impact of B cells on cytokine secretion induced by CD3hi TSP1 was evaluated by adding increasing numbers of B cells into B cell depleted PBMC-Karpas 422 or T cell-Karpas 422 co-culture systems.

### 8.44.1. Materials and Methods

[0920] Karpas 422 cells stably expressing firefly luciferase were plated in a 96 well plate in T Cell Media (TCM) [RPMI-1640 (ThermoFisher Scientific, Cat #11875-085), 10% FBS (Seradigm, Cat #1500-500), 1% L-Glutamine (Thermo Fisher Scientific, Cat #25830-081), 1% Non Essential Amino Acids (Thermo Fisher Scientific, Cat #11140-050), 1% Pen/Strep (Thermo Fisher Scientific, Cat #15070063), 1% HEPES (Thermo Fisher Scientific, Cat #15630080), Sodium Pyruvate (Thermo Fisher Scientific, Cat #11360-070), 0.1% Beta-mercaptoethanol (Thermo Fisher Scientific, Cat #21985-023)]. Peripheral blood mononuclear cells (PBMCs) previously isolated and cryopreserved from 2 Leukopak donors (Hemacare) were thawed and B cells were isolated via positive selection using the REAlease CD19 Microbead Kit [Miltenyi Biotec, Cat #130-117-034] following the manufacturer's protocol. The cells in the flowthrough represent the B cell depleted PBMC fraction, which was co-cultured with Karpas 422 cells at an E:T ratio of 2.5:1. Increasing numbers of the isolated B cells were then added to the co-culture. A dilution series of CD3hi TSP1 (H variant) antibody ranging from 10 nM-0.00001 nM was added to cells and the plates were incubated in a 5% C02, 37° C. incubator for 48 hrs. After 48 hrs, cell supernatants were harvested, diluted 5 fold and a multiplexed ELISA was performed according to the manufacturer's instructions using the V-PLEX Proinflammatory Panel 1 Human Kit (MesoScale Discovery #K15049D-4). In another iteration of the assay, a co-culture between isolated T cells and Karpas 422 cells was set-up at the E:T ratio of 1:1 with the remainder of the set-up remaining same.

### 8.44.2. Results

[0921] A dose dependent increase in cytokine secretion was observed in all co-culture conditions (FIGS. 43A-43B). IL-6 and TNFα are described in the literature as being important contributors to CRS (Ji et al., 2019, Sci. Transl. Med. 11:eaax8861). As compared to the co-culture condition with no B cells, an increase in the absolute amount of IL-6 (FIG. 43A) and TNFα (FIG. 43B) secreted was observed with addition of increasing numbers of B cells.

### 8.45. Example 45: BAFF-R Expression on B-Cell Lymphoma Cell Lines

[0922] Flow cytometric analysis was performed on a panel of lymphoma cell lines to ascertain the surface expression of CD19 and BAFF-R.

### 8.45.1. Materials and Methods

[0923] Cell surface expression of BAFF-R and CD19 on luciferized DOHH-2, Karpas 422 cells, OCILY-19, SUDHL-4 and Toledo cells was determined by flow cytometry using APC labelled anti-BAFF-R (Biolegend, Cat #316916) and FITC-labelled anti-CD19 (Biolegend, Cat #302206) antibodies. Data was acquired on BD FACSCanto and analysed using FlowJo.

### 8.45.2. Results

[0924] The various cell lines had different levels of BAFF-R and CD19 expression (FIGS. 44A.1-44E.2). Karpas 422 cells were found to express high levels of both BAFF-R and CD19 (FIGS. 44B.1-44B.2).

### 8.46. Example 46: CD3hi TSP1-VAY736 Anti-Tumor Combination Activity

[0925] The combined anti-tumor activity of an anti-BAFF-R antibody and CD3hi TSP1 antibody was assessed by co-culturing Karpas 422 cells with B cell depleted PBMCs.

### 8.46.1. Materials and Methods

[0926] Karpas 422 cells stably expressing firefly luciferase were plated in a 96 well plate in NK Media (NKM) [RPMI-1640 (ThermoFisher Scientific, Cat #11835030), 10% Ultra low IgG FBS (ThermoFisher Scientific, Cat #A3381901), 1% HEPES (Thermo Fisher Scientific, Cat #15630080), 0.1% Beta-mercaptoethanol (Thermo Fisher Scientific, Cat #21985-023)]. Peripheral blood mononuclear cells (PBMCs) previously isolated and cryopreserved from 2 Leukopak donors (StemCell Technologies) were thawed and B cells were depleted via positive selection using the REAlease CD19 Microbead Kit [Miltenyi Biotec, Cat #130-117-034] following the manufacturer's protocol. The cells in the flowthrough represent the B cell depleted PBMC fraction, which was co-cultured with Karpas 422 cells at an E:T ratio of 20:1. A dilution series of anti-BAFF-R antibody VAY736 or a non-targeting control antibody (Afuc) ranging from 1000 ng/ml-0.01 ng/ml was added to cells and the plates were incubated in a 5% C02, 370C incubator for 24 hrs. After 24 hrs a dilution series of CD3hi TSP1 Ab (H variant) or CD3hi TSP1C antibody ranging from 0.1 nM-0.0001 nM was added to cells and the plates were incubated in a 5% C02, 37° C. incubator another 48 hrs. At the end of the incubation, BrightGlo luciferase substrate (Promega #E2650) was added to the plate and luminescence was measured on an Envision plate reader after a 5 minute incubation on a shaker. Percent specific lysis was calculated using the following equation:

$$Specific lysis ( \% ) = ( 1 - ( sample luminescence / average maximum luminescence ) ) * 100$$

### 8.46.2. Results

[0927] Cells from different donors have different sensitivity to CD3hi TSP1 and hence different concentrations of CD3hi TSP1 were chosen for evaluation of the combination of CD3hi TSP1 and VAY736. In each case, a submaximal concentration of CD3hi TSP1 was chosen for evaluation of the combination. The combination of VAY736 and CD3hi TSP1 antibody demonstrated greater anti-tumor activity than the control conditions (either the combination of anti-BAFF-R and CD3hi TSP1C (isotype control) antibody or the combination of Isotype and CD3hi TSP1 antibody) (FIGS. 45A-45C).

### 8.47. Example 47: VAY736 Slows Tumor Growth in DLBCL Model

[0928] A study was performed to assess the effect of VAY736 in an in vivo DLBCL model. Briefly, the DLBCL cell line SUDHL4 was implanted subcutaneously into SCID mice, which were then treated weekly with 5 mg/kg or 50 mg/kg VAY736 intravenously. Vehicle and rituximab were used as controls. As shown in FIGS. 46A-46C, VAY736 treatment significantly slowed tumor growth in the model compared to the vehicle control, as assessed by tumor volume measurements collected over time.

### 9. SPECIFIC EMBODIMENTS, CITATION OF REFERENCES

[0929] While various specific embodiments have been illustrated and described, it will be appreciated that various changes can be made without departing from the spirit and scope of the disclosure(s).

[0930] The present disclosure is exemplified by the numbered embodiments set forth below.
[0931] 1. A combination comprising:
   [0932] (a) an anti-CD19 agent; and
   [0933] (b) a B cell targeting agent.
[0934] 2. The combination of embodiment 1, wherein anti-CD19 agent is a CD19 binding molecule.
[0935] 3. The combination of embodiment 2, wherein the CD19 binding molecule comprises CDR-H1, CDR-H2, and CDR-H3 having the amino acid sequences of SEQ ID NO:1, SEQ ID NO:2, and SEQ ID NO:3, and CDR-L1, CDR-L2, and CDR-L3 having the amino acid sequences of SEQ ID NO:14, SEQ ID NO:15, and SEQ ID NO:16.
[0936] 4. The combination of embodiment 2, wherein the CD19 binding molecule comprises CDR-H1, CDR-H2, and CDR-H3 having the amino acid sequences of SEQ ID NO:4, SEQ ID NO:5, and SEQ ID NO:6, and CDR-L1, CDR-L2, and CDR-L3 having the amino acid sequences of SEQ ID NO:17, SEQ ID NO:18, and SEQ ID NO:19.
[0937] 5. The combination of embodiment 2, wherein the CD19 binding molecule comprises CDR-H1, CDR-H2, and CDR-H3 having the amino acid sequences of SEQ ID NO:7, SEQ ID NO:8, and SEQ ID NO:9, and CDR-L1, CDR-L2, and CDR-L3 having the amino acid sequences of SEQ ID NO:20, SEQ ID NO:21, and SEQ ID NO:22.
[0938] 6. The combination of embodiment 2, wherein the CD19 binding molecule comprises CDR-H1, CDR-H2, and CDR-H3 having the amino acid sequences of SEQ ID NO:10, SEQ ID NO:11, and SEQ ID NO:12, and CDR-L1, CDR-L2, and CDR-L3 having the amino acid sequences of SEQ ID NO:23, SEQ ID NO:24, and SEQ ID NO:25.
[0939] 7. The combination of any one of embodiments 3 to 6, wherein the CD19 binding molecule comprises a VH having the amino acid sequence of SEQ ID NO:13.
[0940] 8. The combination of any one of embodiments 3 to 7, wherein the CD19 binding molecule comprises a VL having the amino acid sequence of SEQ ID NO:26.
[0941] 9. The combination of embodiment 2, wherein the CD19 binding molecule comprises CDR-H1, CDR-H2, and CDR-H3 having the amino acid sequences of SEQ ID NO:27, SEQ ID NO:28, and SEQ ID NO:29, and CDR-L1, CDR-L2, and CDR-L3 having the amino acid sequences of SEQ ID NO:40, SEQ ID NO:41, and SEQ ID NO:42.
[0942] 10. The combination of embodiment 2, wherein the CD19 binding molecule comprises CDR-H1, CDR-H2, and CDR-H3 having the amino acid sequences of SEQ ID NO:30, SEQ ID NO:31, and SEQ ID NO:32, and CDR-L1, CDR-L2, and CDR-L3 having the amino acid sequences of SEQ ID NO:43, SEQ ID NO:44, and SEQ ID NO:45.
[0943] 11. The combination of embodiment 2, wherein the CD19 binding molecule comprises CDR-H1, CDR-H2, and CDR-H3 having the amino acid sequences of SEQ ID NO:33, SEQ ID NO:34, and SEQ ID NO:35, and CDR-L1, CDR-L2, and CDR-L3 having the amino acid sequences of SEQ ID NO:46, SEQ ID NO:47, and SEQ ID NO:48.
[0944] 12. The combination of embodiment 2, wherein the CD19 binding molecule comprises CDR-H1, CDR-H2, and CDR-H3 having the amino acid sequences of SEQ ID NO:36, SEQ ID NO:37, and SEQ ID NO:38, and CDR-L1, CDR-L2, and CDR-L3 having the amino acid sequences of SEQ ID NO:49, SEQ ID NO:50, and SEQ ID NO:51.
[0945] 13. The combination of any one of embodiments 9 to 12, wherein the CD19 binding molecule comprises a VH having the amino acid sequence of SEQ ID NO:39.
[0946] 14. The combination of any one of embodiments 9 to 13, wherein the CD19 binding molecule comprises a VL having the amino acid sequence of SEQ ID NO:52.
[0947] 15. The combination of embodiment 2, wherein the CD19 binding molecule comprises:
   [0948] (a) a CDR-H1 having the amino acid sequence of the CDR designated as CD19-H1 in Table 1C;
   [0949] (b) a CDR-H2 having the amino acid sequence of any one of the CDRs designated as CD19-H2A, HD19-H2B, CD19-H2C and CD19-H2D in Table 1C;
   [0950] (c) a CDR-H3 having the amino acid sequence of the CDR designated as CD19-H3 in Table 1C;
   [0951] (d) a CDR-L1 having the amino acid sequence of the CDR designated as CD19-L1 in Table 1C;
   [0952] (e) a CDR-L2 having the amino acid sequence of the CDR designated as CD19-L2 in Table 1C; and
   [0953] (f) a CDR-L3 having the amino acid sequence of the CDR designated as CD19-L23 in Table 1C.
[0954] 16. The combination of embodiment 15, wherein the CD19 binding molecule comprises:
   [0955] (a) a VH having the amino acid sequence of any one of the VH domains designated as CD19-VHA, CD19-VHB, CD19-VHC, and CD19-VHD in Table 1C; and
   [0956] (b) a VL having the amino acid sequence of any one of the VL domains designated as CD19-VLA and CD19-VLB in Table 1C.
[0957] 17. The combination of embodiment 15, wherein the CD19 binding molecule comprises heavy chain CDRs having the amino acid sequences of CD19-H1, CD19-H2A, and CD19-H3 as set forth in Table 1C and light chain CDRs having the amino acid sequences of CD19-L1, CD19-L2, and CD19-L3 as set forth in Table 1C.
[0958] 18. The combination of embodiment 15, wherein the CD19 binding molecule comprises a heavy chain variable region having the amino acid sequences of VHA as set forth in Table 1C and a light chain variable region having the amino acid sequences of VLA as set forth in Table 1C.
[0959] 19. The combination of embodiment 15, wherein the CD19 binding molecule comprises heavy chain CDRs having the amino acid sequences of CD19-H1, CD19-H2B, and CD19-H3 as set forth in Table 1C and light chain CDRs having the amino acid sequences of CD19-L1, CD19-L2, and CD19-L3 as set forth in Table 1C.
[0960] 20. The combination of embodiment 15, wherein the CD19 binding molecule comprises a heavy chain variable region having the amino acid sequences of VHB as set forth in Table 1C and a light chain variable region having the amino acid sequences of VLB as set forth in Table 1C.
[0961] 21. The combination of embodiment 15, wherein the CD19 binding molecule comprises heavy chain CDRs having the amino acid sequences of CD19-H1, CD19-H2C, and CD19-H3 as set forth in Table 1C and light chain CDRs having the amino acid sequences of CD19-L1, CD19-L2, and CD19-L3 as set forth in Table 1C.
[0962] 22. The combination of embodiment 15, wherein the CD19 binding molecule comprises a heavy chain variable region having the amino acid sequences of VHC as set forth in Table 1C and a light chain variable region having the amino acid sequences of VLB as set forth in Table 1C.
[0963] 23. The combination of embodiment 15, wherein the CD19 binding molecule comprises heavy chain CDRs having the amino acid sequences of CD19-H1, CD19-H2D, and CD19-H3 as set forth in Table 1C and light chain CDRs having the amino acid sequences of CD19-L1, CD19-L2, and CD19-L3 as set forth in Table 1C.
[0964] 24. The combination of embodiment 15, wherein the CD19 binding molecule comprises a heavy chain variable region having the amino acid sequences of VHD as set forth in Table 1C and a light chain variable region having the amino acid sequences of VLB as set forth in Table 1C.
[0965] 25. The combination of embodiment 15, wherein the CD19 binding molecule comprises a scFv comprising the amino acid sequence of CD19-scFv1 as set forth in Table 1C.
[0966] 26. The combination of embodiment 15, wherein the CD19 binding molecule comprises a scFv comprising the amino acid sequence of CD19-scFv2 as set forth in Table 1C.
[0967] 27. The combination of embodiment 15, wherein the CD19 binding molecule comprises a scFv comprising the amino acid sequence of CD19-scFv3 as set forth in Table 1C.
[0968] 28. The combination of embodiment 15, wherein the CD19 binding molecule comprises a scFv comprising the amino acid sequence of CD19-scFv4 as set forth in Table 1C.
[0969] 29. The combination of embodiment 15, wherein the CD19 binding molecule comprises a scFv comprising the amino acid sequence of CD19-scFv5 as set forth in Table 1C.
[0970] 30. The combination of embodiment 15, wherein the CD19 binding molecule comprises a scFv comprising the amino acid sequence of CD19-scFv6 as set forth in Table 1C.
[0971] 31. The combination of embodiment 15, wherein the CD19 binding molecule comprises a scFv comprising the amino acid sequence of CD19-scFv7 as set forth in Table 1C.
[0972] 32. The combination of embodiment 15, wherein the CD19 binding molecule comprises a scFv comprising the amino acid sequence of CD19-scFv8 as set forth in Table 1C.
[0973] 33. The combination of embodiment 15, wherein the CD19 binding molecule comprises a scFv comprising the amino acid sequence of CD19-scFv9 as set forth in Table 1C.
[0974] 34. The combination of embodiment 15, wherein the CD19 binding molecule comprises a scFv comprising the amino acid sequence of CD19-scFv10 as set forth in Table 1C.
[0975] 35. The combination of embodiment 15, wherein the CD19 binding molecule comprises a scFv comprising the amino acid sequence of CD19-scFv11 as set forth in Table 1C.
[0976] 36. The combination of embodiment 15, wherein the CD19 binding molecule comprises a scFv comprising the amino acid sequence of CD19-scFv12 as set forth in Table 1C.
[0977] 37. The combination of any one of embodiments 2 to 24, wherein the CD19 binding molecule comprises an antibody, an antibody fragment, an scFv, a dsFv, a Fv, a Fab, an scFab, a (Fab′)2, or a single domain antibody (SDAB).
[0978] 38. The combination of embodiment 37, wherein the CD19 binding molecule comprises an antibody or an antigen-binding domain thereof.
[0979] 39. The combination of any one of embodiments 2 to 38, wherein the CD19 binding molecule is a monospecific binding molecule.
[0980] 40. The combination of any one of embodiments 2 to 38, wherein the CD19 binding molecule is a multispecific binding molecule (MBM).
[0981] 41. The combination of embodiment 40, wherein the CD19 binding molecule comprises
   [0982] (a) an antigen-binding module 1 (ABM1) that binds specifically to CD19; and
   [0983] (b) an antigen-binding module 2 (ABM2) that binds specifically to a different target molecule, optionally wherein the target molecule is a component of a human T-cell receptor (TCR) complex.
[0984] 42. The combination of embodiment 41, wherein ABM1 is an antibody, an antibody fragment, an scFv, a dsFv, a Fv, a Fab, an scFab, a (Fab′)2, a single domain antibody (SDAB), a VH or VL domain, or a camelid VHH domain.
[0985] 43. The combination of embodiment 42, wherein ABM1 is a Fab.
[0986] 44. The combination of embodiment 43, wherein the Fab is a Fab heterodimer.
[0987] 45. The combination of embodiment 42, wherein ABM1 is an scFv.
[0988] 46. The combination of embodiment 42, wherein ABM1 is an anti-CD19 antibody or an antigen-binding domain thereof.
[0989] 47. The combination of any one of embodiments 41 to 46, wherein ABM2 is a non-immunoglobulin scaffold based ABM.
[0990] 48. The combination of embodiment 47, wherein ABM2 is a Kunitz domain, an Adnexin, an Affibody, a DARPin, an Avimer, an Anticalin, a Lipocalin, a Centyrin, a Versabody, a Knottin, an Adnectin, a Pronectin, an Affitin/Nanofitin, an Affilin, an Atrimer/Tetranectin, a bicyclic peptide, a cys-knot, a Fn3 scaffold, an Obody, a Tn3, an Affimer, BD, an Adhiron, a Duocalin, an Alphabody, an Armadillo Repeat Protein, a Repebody, or a Fynomer.
[0991] 49. The combination of any one of embodiments 41 to 46, wherein ABM2 is an immunoglobulin scaffold based ABM.
[0992] 50. The combination of embodiment 49, wherein ABM2 is an antibody, an antibody fragment, an scFv, a dsFv, a Fv, a Fab, an scFab, a (Fab′)2, a single domain antibody (SDAB), a VH or VL domain, or a camelid VHH domain.
[0993] 51. The combination of embodiment 50, wherein ABM2 is an antibody or an antigen-binding domain thereof.
[0994] 52. The combination of embodiment 50, wherein ABM2 is an scFv.
[0995] 53. The combination of embodiment 50, wherein ABM2 is a Fab.
[0996] 54. The combination of embodiment 50, wherein ABM2 is a Fab heterodimer.
[0997] 55. The combination of any one of embodiments 41 to 54, in which ABM2 binds specifically to a component of a human T-cell receptor (TCR) complex.
[0998] 56. The combination of embodiment 55, wherein the component of the TCR complex is CD3.
[0999] 57. The combination of embodiment 56, wherein ABM2 comprises the CDR sequences of CD3hi.
[1000] 58. The combination of embodiment 56, wherein ABM2 comprises the CDR sequences of CD3med.
[1001] 59. The combination of embodiment 56, wherein ABM2 comprises the CDR sequences of CD31o.
[1002] 60. The combination of any one of embodiments 57 to 59, wherein the CDRs are defined by Kabat numbering.
[1003] 61. The combination of any one of embodiments 57 to 59, wherein the CDRs are defined by Chothia numbering.
[1004] 62. The combination of any one of embodiments 57 to 59, wherein the CDRs are defined by a combination of Kabat and Chothia numbering.
[1005] 63. The combination of embodiment 56, wherein ABM2 comprises the heavy and light chain variable sequences of CD3hi, as set forth in Table 9A.
[1006] 64. The combination of embodiment 56, wherein ABM2 comprises the heavy and light chain variable sequences of CD3med, as set forth in Table 9A.
[1007] 65. The combination of embodiment 56, wherein ABM2 comprises the heavy and light chain variable sequences of CD31o, as set forth in Table 9A.
[1008] 66. The combination of embodiment 55, wherein the component of the TCR complex is TCR-α, TCR-β, or a TCR-α/β dimer.
[1009] 67. The combination of embodiment 66, wherein the component of the TCR complex is TCR-α.
[1010] 68. The combination of embodiment 66, wherein the component of the TCR complex is TCR-R.
[1011] 69. The combination of embodiment 66, wherein the component of the TCR complex is a TCR-α/β dimer.
[1012] 70. The combination of embodiment 66, wherein ABM2 comprises the CDR sequences of BMA031.
[1013] 71. The combination of embodiment 70, wherein the CDR sequences of BMA031 are defined by Kabat numbering.
[1014] 72. The combination of embodiment 70, wherein the CDR sequences of BMA031 are defined by Chothia numbering.
[1015] 73. The combination of embodiment 70, wherein the CDR sequences of BMA031 are defined by a combination of Kabat and Chothia numbering.
[1016] 74. The combination of embodiment 70, wherein ABM2 comprises the heavy and light chain variable sequences of BMA031.
[1017] 75. The combination of embodiment 55, wherein the component of the TCR complex is TCR-γ, TCR-δ, or a TCR-γ/δ dimer.
[1018] 76. The combination of embodiment 75, wherein the component of the TCR complex is TCR-γ.
[1019] 77. The combination of embodiment 75, wherein the component of the TCR complex is TCR-δ.
[1020] 78. The combination of embodiment 75, wherein the component of the TCR complex is a TCR-γ/δ dimer.
[1021] 79. The combination of embodiment 75, wherein ABM2 comprises the CDR sequences of δTCS1.
[1022] 80. The combination of embodiment 79, wherein the CDR sequences of 6TCS1 are defined by Kabat numbering.
[1023] 81. The combination of embodiment 79, wherein the CDR sequences of 6TCS1 are defined by Chothia numbering.
[1024] 82. The combination of embodiment 79, wherein the CDR sequences of 6TCS1 are defined by a combination of Kabat and Chothia numbering.
[1025] 83. The combination of embodiment 79, wherein ABM2 comprises the heavy and light chain variable sequences of 6TCS1.
[1026] 84. The combination of any one of embodiments 41 to 83, in which ABM1 is capable of binding CD19 at the same time as ABM2 is bound to its target molecule.
[1027] 85. The CD19 binding molecule of any one of embodiments 40 to 84, where the CD19 binding molecule is a bispecific binding molecule (BBM).
[1028] 86. The combination of embodiment 85, wherein the BBM is bivalent.
[1029] 87. The combination of embodiment 86, wherein the CD19 binding molecule has any one of the configurations depicted in FIGS. 1B-1F.
[1030] 88. The combination of embodiment 87, wherein the CD19 binding molecule has the configuration depicted in FIG. 1B.
[1031] 89. The combination of embodiment 87, wherein the CD19 binding molecule has the configuration depicted in FIG. 1C.
[1032] 90. The combination of embodiment 87, wherein the CD19 binding molecule has the configuration depicted in FIG. 1D.
[1033] 91. The combination of embodiment 87, wherein the CD19 binding molecule has the configuration depicted in FIG. 1E.
[1034] 92. The combination of embodiment 87, wherein the CD19 binding molecule has the configuration depicted in FIG. 1F.
[1035] 93. The combination of any one of embodiments 87 to 92, wherein the CD19 binding molecule has the configuration referred to as 1 in Section 7.2.3.1.
[1036] 94. The combination of any one of embodiments 87 to 92, wherein the CD19 binding molecule has the configuration referred to as B2 in Section 7.2.3.1.
[1037] 95. The combination of embodiment 85, wherein the CD19 binding molecule is trivalent.
[1038] 96. The combination of embodiment 95, wherein the CD19 binding molecule has any one of the configurations depicted in FIGS. 1G-1Z.
[1039] 97. The combination of embodiment 96, wherein the CD19 binding molecule has the configuration depicted in FIG. 1G.
[1040] 98. The combination of embodiment 96, wherein the CD19 binding molecule has the configuration depicted in FIG. 1H.
[1041] 99. The combination of embodiment 96, wherein the CD19 binding molecule has the configuration depicted in FIG. 11.
[1042] 100. The combination of embodiment 96, wherein the CD19 binding molecule has the configuration depicted in FIG. 1J.
[1043] 101. The combination of embodiment 96, wherein the CD19 binding molecule has the configuration depicted in FIG. 1K.
[1044] 102. The combination of embodiment 96, wherein the CD19 binding molecule has the configuration depicted in FIG. 1L.
[1045] 103. The combination of embodiment 96, wherein the CD19 binding molecule has the configuration depicted in FIG. 1M.
[1046] 104. The combination of embodiment 96, wherein the CD19 binding molecule has the configuration depicted in FIG. 1N.
[1047] 105. The combination of embodiment 96, wherein the CD19 binding molecule has the configuration depicted in FIG. 1O.
[1048] 106. The combination of embodiment 96, wherein the CD19 binding molecule has the configuration depicted in FIG. 1P.
[1049] 107. The combination of embodiment 96, wherein the CD19 binding molecule has the configuration depicted in FIG. 1Q.
[1050] 108. The combination of embodiment 96, wherein the CD19 binding molecule has the configuration depicted in FIG. 1R.
[1051] 109. The combination of embodiment 96, wherein the CD19 binding molecule has the configuration depicted in FIG. 1S.
[1052] 110. The combination of embodiment 96, wherein the CD19 binding molecule has the configuration depicted in FIG. 1T.
[1053] 111. The combination of embodiment 96, wherein the CD19 binding molecule has the configuration depicted in FIG. 1U.
[1054] 112. The combination of embodiment 96, wherein the CD19 binding molecule has the configuration depicted in FIG. 1V.
[1055] 113. The combination of embodiment 96, wherein the CD19 binding molecule has the configuration depicted in FIG. 1W.
[1056] 114. The combination of embodiment 96, wherein the CD19 binding molecule has the configuration depicted in FIG. 1X.
[1057] 115. The combination of embodiment 96, wherein the CD19 binding molecule has the configuration depicted in FIG. 1Y.
[1058] 116. The combination of embodiment 96, wherein the CD19 binding molecule has the configuration depicted in FIG. 1Z.
[1059] 117. The combination of any one of embodiments 95 to 116, wherein the CD19 binding molecule has the configuration referred to as T1 in Section 7.2.3.2.
[1060] 118. The combination of any one of embodiments 95 to 116, wherein the CD19 binding molecule has the configuration referred to as T2 in Section 7.2.3.2.
[1061] 119. The combination of any one of embodiments 95 to 116, wherein the CD19 binding molecule has the configuration referred to as T3 in Section 7.2.3.2.
[1062] 120. The combination of any one of embodiments 95 to 116, wherein the CD19 binding molecule has the configuration referred to as T4 in Section 7.2.3.2.
[1063] 121. The combination of any one of embodiments 95 to 116, wherein the CD19 binding molecule has the configuration referred to as T5 in Section 7.2.3.2.
[1064] 122. The combination of any one of embodiments 95 to 116, wherein the CD19 binding molecule has the configuration referred to as T6 in Section 7.2.3.2.
[1065] 123. The combination of embodiment 85, wherein the CD19 binding molecule is tetravalent.
[1066] 124. The combination of embodiment 123, wherein the CD19 binding molecule has any one of the configurations depicted in FIGS. 1AA-1AH.
[1067] 125. The combination of embodiment 124, wherein the CD19 binding molecule has the configuration depicted in FIG. 1AA.
[1068] 126. The combination of embodiment 124, wherein the CD19 binding molecule has the configuration depicted in FIG. 1AB.
[1069] 127. The combination of embodiment 124, wherein the CD19 binding molecule has the configuration depicted in FIG. 1AC.
[1070] 128. The combination of embodiment 124, wherein the CD19 binding molecule has the configuration depicted in FIG. 1AD.
[1071] 129. The combination of embodiment 124, wherein the CD19 binding molecule has the configuration depicted in FIG. 1AE.
[1072] 130. The combination of embodiment 124, wherein the CD19 binding molecule has the configuration depicted in FIG. 1AF.
[1073] 131. The combination of embodiment 124, wherein the CD19 binding molecule has the configuration depicted in FIG. 1AG.
[1074] 132. The combination of embodiment 124, wherein the CD19 binding molecule has the configuration depicted in FIG. 1AH.
[1075] 133. The combination of any one of embodiments 123 to 132, wherein the CD19 binding molecule has the configuration referred to as Tv 1 in Section 7.2.3.3.
[1076] 134. The combination of any one of embodiments 123 to 132, wherein the CD19 binding molecule has the configuration referred to as Tv 2 in Section 7.2.3.3.
[1077] 135. The combination of any one of embodiments 123 to 132, wherein the CD19 binding molecule has the configuration referred to as Tv 3 in Section 7.2.3.3.
[1078] 136. The combination of any one of embodiments 123 to 132, wherein the CD19 binding molecule has the configuration referred to as Tv 4 in Section 7.2.3.3.
[1079] 137. The combination of any one of embodiments 123 to 132, wherein the CD19 binding molecule has the configuration referred to as Tv 5 in Section 7.2.3.3.
[1080] 138. The combination of any one of embodiments 123 to 132, wherein the CD19 binding molecule has the configuration referred to as Tv 6 in Section 7.2.3.3.
[1081] 139. The combination of any one of embodiments 123 to 132, wherein the CD19 binding molecule has the configuration referred to as Tv 7 in Section 7.2.3.3.
[1082] 140. The combination of any one of embodiments 123 to 132, wherein the CD19 binding molecule has the configuration referred to as Tv 8 in Section 7.2.3.3.
[1083] 141. The combination of any one of embodiments 123 to 132, wherein the CD19 binding molecule has the configuration referred to as Tv 9 in Section 7.2.3.3.
[1084] 142. The combination of any one of embodiments 123 to 132, wherein the CD19 binding molecule has the configuration referred to as Tv 10 in Section 7.2.3.3.
[1085] 143. The combination of any one of embodiments 123 to 132, wherein the CD19 binding molecule has the configuration referred to as Tv 11 in Section 7.2.3.3.
[1086] 144. The combination of any one of embodiments 123 to 132, wherein the CD19 binding molecule has the configuration referred to as Tv 12 in Section 7.2.3.3.
[1087] 145. The combination of any one of embodiments 123 to 132, wherein the CD19 binding molecule has the configuration referred to as Tv 13 in Section 7.2.3.3.
[1088] 146. The combination of any one of embodiments 123 to 132, wherein the CD19 binding molecule has the configuration referred to as Tv 14 in Section 7.2.3.3.
[1089] 147. The combination of any one of embodiments 41 to 84, wherein the CD19 binding molecule is a trispecific binding molecule (TBM) comprising an antigen-binding module 3 (ABM3) that binds specifically to a target molecule other than CD19.
[1090] 148. The combination of embodiment 147, in which ABM2 binds specifically to a component of a human T-cell receptor (TCR) complex and ABM3 binds specifically to (i) human CD2 or (ii) a tumor associated antigen (TAA).
[1091] 149. The combination of embodiment 147 or embodiment 148, which is trivalent.
[1092] 150. The combination of embodiment 149, wherein the CD19 binding molecule has any one of the configurations depicted in FIGS. 2A-2P.
[1093] 151. The combination of embodiment 150, wherein the CD19 binding molecule has the configuration depicted in FIG. 2A.
[1094] 152. The combination of embodiment 150, wherein the CD19 binding molecule has the configuration depicted in FIG. 2B.
[1095] 153. The combination of embodiment 150, wherein the CD19 binding molecule has the configuration depicted in FIG. 2C.
[1096] 154. The combination of embodiment 150, wherein the CD19 binding molecule has the configuration depicted in FIG. 2D.
[1097] 155. The combination of embodiment 150, wherein the CD19 binding molecule has the configuration depicted in FIG. 2E.
[1098] 156. The combination of embodiment 150, wherein the CD19 binding molecule has the configuration depicted in FIG. 2F.
[1099] 157. The combination of embodiment 150, wherein the CD19 binding molecule has the configuration depicted in FIG. 2G.
[1100] 158. The combination of embodiment 150, wherein the CD19 binding molecule has the configuration depicted in FIG. 2H.
[1101] 159. The combination of embodiment 150, wherein the CD19 binding molecule has the configuration depicted in FIG. 2I.
[1102] 160. The combination of embodiment 150, wherein the CD19 binding molecule has the configuration depicted in FIG. 2J.
[1103] 161. The combination of embodiment 150, wherein the CD19 binding molecule has the configuration depicted in FIG. 2K.
[1104] 162. The combination of embodiment 150, wherein the CD19 binding molecule has the configuration depicted in FIG. 2L.
[1105] 163. The combination of embodiment 150, wherein the CD19 binding molecule has the configuration depicted in FIG. 2M.
[1106] 164. The combination of embodiment 150, wherein the CD19 binding molecule has the configuration depicted in FIG. 2N.
[1107] 165. The combination of embodiment 150, wherein the CD19 binding molecule has the configuration depicted in FIG. 2O.
[1108] 166. The combination of embodiment 150, wherein the CD19 binding molecule has the configuration depicted in FIG. 2P.
[1109] 167. The combination of any one of embodiments 150 to 166, wherein the CD19 binding molecule has the configuration referred to as T1 in Section 7.2.4.1.
[1110] 168. The combination of any one of embodiments 150 to 166, wherein the CD19 binding molecule has the configuration referred to as T2 in Section 7.2.4.1.
[1111] 169. The combination of any one of embodiments 150 to 166, wherein the CD19 binding molecule has the configuration referred to as T3 in Section 7.2.4.1.
[1112] 170. The combination of any one of embodiments 150 to 166, wherein the CD19 binding molecule has the configuration referred to as T4 in Section 7.2.4.1.
[1113] 171. The combination of any one of embodiments 150 to 166, wherein the CD19 binding molecule has the configuration referred to as T5 in Section 7.2.4.1.
[1114] 172. The combination of any one of embodiments 150 to 166, wherein the CD19 binding molecule has the configuration referred to as T6 in Section 7.2.4.1.
[1115] 173. The combination of embodiment 147 or embodiment 148, wherein the CD19 binding molecule is tetravalent.
[1116] 174. The combination of embodiment 173, wherein the CD19 binding molecule has any one of the configurations depicted in FIGS. 2Q-2S.
[1117] 175. The combination of embodiment 174, wherein the CD19 binding molecule has the configuration depicted in FIG. 2Q.
[1118] 176. The combination of embodiment 174, wherein the CD19 binding molecule has the configuration depicted in FIG. 2R.
[1119] 177. The combination of embodiment 174, wherein the CD19 binding molecule has the configuration depicted in FIG. 2S.
[1120] 178. The combination of embodiment 147 or embodiment 148, wherein the CD19 binding molecule is pentavalent.
[1121] 179. The combination of embodiment 178, wherein the CD19 binding molecule has the configuration depicted in FIG. 2T.
[1122] 180. The combination of embodiment 147 or embodiment 148, wherein the CD19 binding molecule is hexavalent.
[1123] 181. The combination of embodiment 180, wherein the CD19 binding molecule has any one of the configurations depicted in FIGS. 2U-2V.
[1124] 182. The combination of embodiment 181, wherein the CD19 binding molecule has the configuration depicted in FIG. 2U.
[1125] 183. The combination of embodiment 181, wherein the CD19 binding molecule has the configuration depicted in FIG. 2V.
[1126] 184. The combination of any one of embodiments 147 to 183, in which ABM1 is capable of binding CD19 at the same time ABM3 is bound to its target molecule.
[1127] 185. The combination of any one of embodiments 147 to 184, in which ABM3 binds specifically to human CD2.
[1128] 186. The combination of embodiment 185, wherein ABM3 is a non-immunoglobulin scaffold based ABM.
[1129] 187. The combination of embodiment 186, wherein ABM3 is a Kunitz domain, an Adnexin, an Affibody, a DARPin, an Avimer, an Anticalin, a Lipocalin, a Centyrin, a Versabody, a Knottin, an Adnectin, a Pronectin, an Affitin/Nanofitin, an Affilin, an Atrimer/Tetranectin, a bicyclic peptide, a cys-knot, a Fn3 scaffold, an Obody, a Tn3, an Affimer, BD, an Adhiron, a Duocalin, an Alphabody, an Armadillo Repeat Protein, a Repebody, or a Fynomer.
[1130] 188. The combination of embodiment 186, wherein ABM3 comprises a receptor binding domain of a CD2 ligand.
[1131] 189. The combination of embodiment 185, wherein ABM3 is a CD58 moiety.
[1132] 190. The combination of embodiment 189, wherein the CD58 moiety comprises the amino acid sequence of CD58-1 as set forth in Table 12.
[1133] 191. The combination of embodiment 189, wherein the CD58 moiety comprises the amino acid sequence of CD58-2 as set forth in Table 12.
[1134] 192. The combination of embodiment 189, wherein the CD58 moiety comprises the amino acid sequence of CD58-3 as set forth in Table 12.
[1135] 193. The combination of embodiment 189, wherein the CD58 moiety comprises the amino acid sequence of CD58-4 as set forth in Table 12.
[1136] 194. The combination of embodiment 189, wherein the CD58 moiety comprises the amino acid sequence of CD58-5 as set forth in Table 12.
[1137] 195. The combination of embodiment 194, wherein the amino acid designated as B is a phenylalanine.
[1138] 196. The combination of embodiment 194, wherein the amino acid designated as B is a serine.
[1139] 197. The combination of any one of embodiments 194 to 196, wherein the amino acid designated as J is a valine.
[1140] 198. The combination of any one of embodiments 194 to 196, wherein the amino acid designated as J is a lysine.
[1141] 199. The combination of any one of embodiments 194 to 198, wherein the amino acid designated as O is a valine.
[1142] 200. The combination of any one of embodiments 194 to 198, wherein the amino acid designated as O is a glutamine.
[1143] 201. The combination of any one of embodiments 194 to 200, wherein the amino acid designated as U is a valine.
[1144] 202. The combination of any one of embodiments 194 to 200, wherein the amino acid designated as U is a lysine.
[1145] 203. The combination of any one of embodiments 194 to 202, wherein the amino acid designated as X is a threonine.
[1146] 204. The combination of any one of embodiments 194 to 202, wherein the amino acid designated as X is a serine.
[1147] 205. The combination of any one of embodiments 194 to 204, wherein the amino acid designated as Z is a leucine.
[1148] 206. The combination of any one of embodiments 194 to 204, wherein the amino acid designated as Z is a glycine.
[1149] 207. The combination of embodiment 189, wherein the CD58 moiety comprises the amino acid sequence of CD58-6 as set forth in Table 12.
[1150] 208. The combination of embodiment 189, wherein the CD58 moiety comprises the amino acid sequence of CD58-7 as set forth in Table 12.
[1151] 209. The combination of embodiment 208, wherein the amino acid designated as J is a valine.
[1152] 210. The combination of embodiment 208, wherein the amino acid designated as J is a lysine.
[1153] 211. The combination of any one of embodiments 208 to 210, wherein the amino acid designated as O is a valine.
[1154] 212. The combination of any one of embodiments 208 to 210, wherein the amino acid designated as O is a glutamine.
[1155] 213. The combination of embodiment 189, wherein the CD58 moiety comprises the amino acid sequence of CD58-8 as set forth in Table 12.
[1156] 214. The combination of embodiment 189, wherein the CD58 moiety comprises the amino acid sequence of CD58-9 as set forth in Table 12.
[1157] 215. The combination of embodiment 189, wherein the CD58 moiety comprises the amino acid sequence of CD58-10 as set forth in Table 12.
[1158] 216. The combination of embodiment 189, wherein the CD58 moiety comprises the amino acid sequence of CD58-11 as set forth in Table 12.
[1159] 217. The combination of embodiment 185, wherein ABM3 is a CD48 moiety.
[1160] 218. The combination of embodiment 217, wherein the CD48 moiety has at least 70% sequence identity to amino acids 27-220 of the amino acid sequence of Uniprot identifier P09326.
[1161] 219. The combination of embodiment 217, wherein the CD48 moiety has at least 80% sequence identity to amino acids 27-220 of the amino acid sequence of Uniprot identifier P09326.
[1162] 220. The combination of embodiment 217, wherein the CD48 moiety has at least 90% sequence identity to amino acids 27-220 of the amino acid sequence of Uniprot identifier P09326.
[1163] 221. The combination of embodiment 217, wherein the CD48 moiety has at least 95% sequence identity to amino acids 27-220 of the amino acid sequence of Uniprot identifier P09326.
[1164] 222. The combination of embodiment 217, wherein the CD48 moiety has at least 99% sequence identity to amino acids 27-220 of the amino acid sequence of Uniprot identifier P09326.
[1165] 223. The combination of embodiment 185, wherein ABM3 is an immunoglobulin scaffold based ABM.
[1166] 224. The combination of embodiment 223, wherein ABM3 is an antibody, an antibody fragment, an scFv, a dsFv, a Fv, a Fab, an scFab, a (Fab′)2, a single domain antibody (SDAB), a VH or VL domain, or a camelid VHH domain.
[1167] 225. The combination of embodiment 223, wherein ABM3 is an anti-CD2 antibody or an antigen-binding domain thereof.
[1168] 226. The combination of embodiment 224, wherein ABM3 is an scFv.
[1169] 227. The combination of embodiment 224, wherein ABM3 is a Fab.
[1170] 228. The combination of embodiment 227, wherein ABM3 is a Fab heterodimer.
[1171] 229. The combination of any one of embodiments 223 to 228, wherein ABM3 comprises the CDR sequences of CD2-1.
[1172] 230. The combination of embodiment 229, wherein ABM3 comprises the heavy and light chain variable sequences of CD2-1.
[1173] 231. The combination of embodiment 229, wherein ABM3 comprises the heavy and light chain variable sequences of hu1CD2-1.
[1174] 232. The combination of embodiment 229, wherein ABM3 comprises the heavy and light chain variable sequences of hu2CD2-1.
[1175] 233. The combination of embodiment 229, wherein ABM3 comprises the CDR sequences of Medi 507.
[1176] 234. The combination of embodiment 233, wherein ABM3 comprises the heavy and light chain variable sequences of Medi 507.
[1177] 235. The combination of any one of embodiments 147 to 184, in which ABM3 binds specifically to a human TAA.
[1178] 236. The combination of embodiment 235, wherein ABM3 is a non-immunoglobulin scaffold based ABM.
[1179] 237. The combination of embodiment 236, wherein if TAA is a receptor, ABM3 comprises a receptor binding domain of a ligand of the receptor, and if TAA is a ligand, ABM3 comprises a ligand binding domain of a receptor of the ligand.
[1180] 238. The combination of embodiment 236, wherein ABM3 is a Kunitz domain, an Adnexin, an Affibody, a DARPin, an Avimer, an Anticalin, a Lipocalin, a Centyrin, a Versabody, a Knottin, an Adnectin, a Pronectin, an Affitin/Nanofitin, an Affilin, an Atrimer/Tetranectin, a bicyclic peptide, a cys-knot, a Fn3 scaffold, an Obody, a Tn3, an Affimer, BD, an Adhiron, a Duocalin, an Alphabody, an Armadillo Repeat Protein, a Repebody, or a Fynomer.
[1181] 239. The combination of embodiment 235, wherein ABM3 is an immunoglobulin scaffold based ABM.
[1182] 240. The combination of embodiment 239, wherein ABM3 is an antibody, an antibody fragment, an scFv, a dsFv, a Fv, a Fab, an scFab, a (Fab′)2, a single domain antibody (SDAB), a VH or VL domain, or a camelid VHH domain.
[1183] 241. The combination of embodiment 240, wherein ABM3 is an antibody or an antigen-binding domain thereof.
[1184] 242. The combination of embodiment 240, wherein ABM3 is an scFv.
[1185] 243. The combination of embodiment 240, wherein ABM3 is a Fab.
[1186] 244. The combination of embodiment 243, wherein ABM3 is a Fab heterodimer.
[1187] 245. The combination of any one of embodiments 235 to 244, wherein the TAA is a TAA expressed on cancerous B cells that are B cell-derived plasma cells.
[1188] 246. The combination of any one of embodiments 235 to 245, wherein the TAA is a TAA expressed on cancerous B cells that are not plasma cells.
[1189] 247. The combination of any one of embodiments 235 to 246, wherein the TAA is selected from BCMA, CD20, CD22, CD123, CD33, CLL1, CD138, CS1, CD38, CD133, FLT3, CD52, TNFRSF13C, TNFRSF13B, CXCR4, PD-L1, LY9, CD200, FCGR2B, CD21, CD23, CD24, CD40L, CD72, CD79a, and CD79b.
[1190] 248. The combination of embodiment 247, wherein the TAA is BCMA.
[1191] 249. The combination of embodiment 247, wherein the TAA is CD20.
[1192] 250. The combination of embodiment 247, wherein the TAA is CD22.
[1193] 251. The combination of embodiment 247, wherein the TAA is CD123.
[1194] 252. The combination of embodiment 247, wherein the TAA is CD33.
[1195] 253. The combination of embodiment 247, wherein the TAA is CLL1.
[1196] 254. The combination of embodiment 247, wherein the TAA is CD138.
[1197] 255. The combination of embodiment 247, wherein the TAA is CS1.
[1198] 256. The combination of embodiment 247, wherein the TAA is CD38.
[1199] 257. The combination of embodiment 247, wherein the TAA is CD133.
[1200] 258. The combination of embodiment 247, wherein the TAA is FLT3.
[1201] 259. The combination of embodiment 247, wherein the TAA is CD52.
[1202] 260. The combination of embodiment 247, wherein the TAA is TNFRSF13C.
[1203] 261. The combination of embodiment 247, wherein the TAA is TNFRSF13B.
[1204] 262. The combination of embodiment 247, wherein the TAA is CXCR4.
[1205] 263. The combination of embodiment 247, wherein the TAA is PD-L1.
[1206] 264. The combination of embodiment 247, wherein the TAA is LY9.
[1207] 265. The combination of embodiment 247, wherein the TAA is CD200.
[1208] 266. The combination of embodiment 247, wherein the TAA is FCGR2B.
[1209] 267. The combination of embodiment 247, wherein the TAA is CD21.
[1210] 268. The combination of embodiment 247, wherein the TAA is CD23.
[1211] 269. The combination of embodiment 247, wherein ABM3 comprises a binding sequence set forth in Table 13.
[1212] 270. The combination of any one of embodiments 38 to 269, wherein the CD19 binding molecule comprises a first variant Fc region and a second variant Fc region forming a Fc domain.
[1213] 271. The combination of embodiment 270, wherein the first variant Fc region is a variant human IgG1 Fc region and the second variang Fc region is a human IgG1 Fc region, wherein the first and second variant Fc regions comprise L234A, L235A, and G237A (“LALAGA”) substitutions, L234A, L235A, S267K, and P329A (“LALASKPA”) substitutions, D265A, P329A, and S267K (“DAPASK”) substitutions, G237A, D265A, and P329A (“GADAPA”) substitutions, G237A, D265A, P329A, and S267K (“GADAPASK”) substitutions, L234A, L235A, and P329G (“LALAPG”) substitutions, or L234A, L235A, and P329A (“LALAPA”) substitutions, wherein the amino acid residues are numbered according to the EU numbering system.
[1214] 272. The combination of embodiment 271, wherein the first variant Fc region and the second variant Fc region comprise L234A, L235A, and G237A (“LALAGA”) substitutions, wherein the amino acid residues are numbered according to the EU numbering system.
[1215] 273. The combination of embodiment 271, wherein the first variant Fc region and the second variant Fc region comprise L234A, L235A, S267K, and P329A (“LALASKPA”) substitutions, wherein the amino acid residues are numbered according to the EU numbering system.
[1216] 274. The combination of embodiment 271, wherein the first variant Fc region and the second variant Fc region comprise D265A, P329A, and S267K (“DAPASK”) substitutions, wherein the amino acid residues are numbered according to the EU numbering system.
[1217] 275. The combination of embodiment 271, the first variant Fc region and the second variant Fc region comprise G237A, D265A, and P329A (“GADAPA”) substitutions, wherein the amino acid residues are numbered according to the EU numbering system.
[1218] 276. The combination of embodiment 271, wherein the first variant Fc region and the second variant Fc region comprise G237A, D265A, P329A, and S267K (“GADAPASK”) substitutions, wherein the amino acid residues are numbered according to the EU numbering system.
[1219] 277. The combination of embodiment 271, wherein the first variant Fc region and the second variant Fc region comprise L234A, L235A, and P329G (“LALAPG”) substitutions, wherein the amino acid residues are numbered according to the EU numbering system.
[1220] 278. The combination of embodiment 271, wherein the first variant Fc region and the second variant Fc region comprise L234A, L235A, and P329A (“LALAPA”) substitutions, wherein the amino acid residues are numbered according to the EU numbering system.
[1221] 279. The combination of embodiment 271, wherein the first variant Fc region and/or the second variant Fc region comprises a sequence having at least 95% identity to FCV-1, FCV-2, FCV-3, FCV-4, FCV-5, FCV-6, or FCV-7.
[1222] 280. The combination of embodiment 279, wherein the first variant Fc region and/or the second variant Fc region comprises a sequence having at least 95% identity to FCV-1.
[1223] 281. The combination of embodiment 279, wherein the first variant Fc region and/or the second variant Fc region comprises a sequence having at least 96% identity to FCV-1.
[1224] 282. The combination of embodiment 279, wherein the first variant Fc region and/or the second variant Fc region comprises a sequence having at least 97% identity to FCV-1.
[1225] 283. The combination of embodiment 279, wherein the first variant Fc region and/or the second variant Fc region comprises a sequence having at least 98% identity to FCV-1.
[1226] 284. The combination of embodiment 279, wherein the first variant Fc region and/or the second variant Fc region comprises a sequence having at least 99% identity to FCV-1.
[1227] 285. The combination of embodiment 279, wherein the first variant Fc region and/or the second variant Fc region comprises a sequence having at least 95% identity to FCV-2.
[1228] 286. The combination of embodiment 279, wherein the first variant Fc region and/or the second variant Fc region comprises a sequence having at least 96% identity to FCV-2.
[1229] 287. The combination of embodiment 279, wherein the first variant Fc region and/or the second variant Fc region comprises a sequence having at least 97% identity to FCV-2.
[1230] 288. The combination of embodiment 279, wherein the first variant Fc region and/or the second variant Fc region comprises a sequence having at least 98% identity to FCV-2.
[1231] 289. The combination of embodiment 279, wherein the first variant Fc region and/or the second variant Fc region comprises a sequence having at least 99% identity to FCV-2.
[1232] 290. The combination of embodiment 279, wherein the first variant Fc region and/or the second variant Fc region comprises a sequence having at least 95% identity to FCV-3.
[1233] 291. The combination of embodiment 279, wherein the first variant Fc region and/or the second variant Fc region comprises a sequence having at least 96% identity to FCV-3.
[1234] 292. The combination of embodiment 279, wherein the first variant Fc region and/or the second variant Fc region comprises a sequence having at least 97% identity to FCV-3.
[1235] 293. The combination of embodiment 279, wherein the first variant Fc region and/or the second variant Fc region comprises a sequence having at least 98% identity to FCV-3.
[1236] 294. The combination of embodiment 279, wherein the first variant Fc region and/or the second variant Fc region comprises a sequence having at least 99% identity to FCV-3.
[1237] 295. The combination of embodiment 279, wherein the first variant Fc region and/or the second variant Fc region comprises a sequence having at least 95% identity to FCV-4.
[1238] 296. The combination of embodiment 279, wherein the first variant Fc region and/or the second variant Fc region comprises a sequence having at least 96% identity to FCV-4.
[1239] 297. The combination of embodiment 279, wherein the first variant Fc region and/or the second variant Fc region comprises a sequence having at least 97% identity to FCV-4.
[1240] 298. The combination of embodiment 279, wherein the first variant Fc region and/or the second variant Fc region comprises a sequence having at least 98% identity to FCV-4.
[1241] 299. The combination of embodiment 279, wherein the first variant Fc region and/or the second variant Fc region comprises a sequence having at least 99% identity to FCV-4.
[1242] 300. The combination of embodiment 279, wherein the first variant Fc region and/or the second variant Fc region comprises a sequence having at least 95% identity to FCV-5.
[1243] 301. The combination of embodiment 279, wherein the first variant Fc region and/or the second variant Fc region comprises a sequence having at least 96% identity to FCV-5.
[1244] 302. The combination of embodiment 279, wherein the first variant Fc region and/or the second variant Fc region comprises a sequence having at least 97% identity to FCV-5.
[1245] 303. The combination of embodiment 279, wherein the first variant Fc region and/or the second variant Fc region comprises a sequence having at least 98% identity to FCV-5.
[1246] 304. The combination of embodiment 279, wherein the first variant Fc region and/or the second variant Fc region comprises a sequence having at least 99% identity to FCV-5.
[1247] 305. The combination of embodiment 279, wherein the first variant Fc region and/or the second variant Fc region comprises a sequence having at least 95% identity to FCV-6.
[1248] 306. The combination of embodiment 279, wherein the first variant Fc region and/or the second variant Fc region comprises a sequence having at least 96% identity to FCV-6.
[1249] 307. The combination of embodiment 279, wherein the first variant Fc region and/or the second variant Fc region comprises a sequence having at least 97% identity to FCV-6.
[1250] 308. The combination of embodiment 279, wherein the first variant Fc region and/or the second variant Fc region comprises a sequence having at least 98% identity to FCV-6.
[1251] 309. The combination of embodiment 279, wherein the first variant Fc region and/or the second variant Fc region comprises a sequence having at least 99% identity to FCV-6.
[1252] 310. The combination of embodiment 279, wherein the first variant Fc region and/or the second variant Fc region comprises a sequence having at least 95% identity to FCV-7.
[1253] 311. The combination of embodiment 279, wherein the first variant Fc region and/or the second variant Fc region comprises a sequence having at least 96% identity to FCV-7.
[1254] 312. The combination of embodiment 279, wherein the first variant Fc region and/or the second variant Fc region comprises a sequence having at least 97% identity to FCV-7.
[1255] 313. The combination of embodiment 279, wherein the first variant Fc region and/or the second variant Fc region comprises a sequence having at least 98% identity to FCV-7.
[1256] 314. The combination of embodiment 279, wherein the first variant Fc region and/or the second variant Fc region comprises a sequence having at least 99% identity to FCV-7.
[1257] 315. The combination of embodiment 279, wherein the first variant Fc region and/or the second variant Fc region comprises a sequence having 100% identity to FCV-1.
[1258] 316. The combination of embodiment 279, wherein the first variant Fc region and/or the second variant Fc region comprises a sequence having 100% identity to FCV-2.
[1259] 317. The combination of embodiment 279, wherein the first variant Fc region and/or the second variant Fc region comprises a sequence having 100% identity to FCV-3.
[1260] 318. The combination of embodiment 279, wherein the first variant Fc region and/or the second variant Fc region comprises a sequence having 100% identity to FCV-4.
[1261] 319. The combination of embodiment 279, wherein the first variant Fc region and/or the second variant Fc region comprises a sequence having 100% identity to FCV-5.
[1262] 320. The combination of embodiment 279, wherein the first variant Fc region and/or the second variant Fc region comprises a sequence having 100% identity to FCV-6.
[1263] 321. The combination of embodiment 279, wherein the first variant Fc region and/or the second variant Fc region comprises a sequence having 100% identity to FCV-7.
[1264] 322. The combination of any one of embodiments 270 to 321, wherein the first variant Fc region and the second variant Fc region together form an Fc heterodimer.
[1265] 323. The combination of embodiment 322, wherein the first and second variant Fc regions comprise the amino acid substitutions amino acid substitutions T366W: T366S/L368A/Y407V.
[1266] 324. The combination of embodiment 322, wherein the first and second variant Fc regions comprise the amino acid substitutions S364K/E357Q:L368D/K370S.
[1267] 325. The combination of embodiments 322, wherein the first and second variant Fc regions comprise the amino acid substitutions L368D/K370S:S364K.
[1268] 326. The combination of embodiment 322, wherein the first and second variant Fc regions comprise the amino acid substitutions L368E/K370S:S364K.
[1269] 327. The combination of embodiment 322, wherein the first and second variant Fc regions comprise the amino acid substitutionsT411T/E360E/Q362E: D401K.
[1270] 328. The combination of embodiment 322, wherein the first and second variant Fc regions comprise the amino acid substitutions L368D 370S: S364/E357L.
[1271] 329. The combination of embodiment 322, wherein the first and second variant Fc regions comprise the amino acid substitutions 370S: S364K/E357Q.
[1272] 330. The combination of embodiment 322, wherein the first and second variant Fc regions comprise the amino acid substitutions of any one of the steric variants listed in FIG. 4 of WO 2014/110601 (reproduced in Table 4).
[1273] 331. The combination of embodiment 322, wherein the first and second variant Fc regions comprise the amino acid substitutions of any one of the variants listed in FIG. 5 of WO 2014/110601 (reproduced in Table 4).
[1274] 332. The combination of embodiment 322, wherein the first and second variant Fc regions comprise the amino acid substitutions of any one of the variants listed in FIG. 6 of WO 2014/110601 (reproduced in Table 4).
[1275] 333. The combination of any one of embodiments 322 to 332, wherein at least one of the Fc regions comprises an ablation variant modification.
[1276] 334. The combination of embodiment 333, wherein the ablation variant modifications are selected from Table 3.
[1277] 335. The combination of embodiment 334, wherein the ablation variant modification comprises G236R.
[1278] 336. The combination of embodiment 334, wherein the ablation variant modification comprises S239G.
[1279] 337. The combination of embodiment 334, wherein the ablation variant modification comprises S239K.
[1280] 338. The combination of embodiment 334, wherein the ablation variant modification comprises S239Q.
[1281] 339. The combination of embodiment 334, wherein the ablation variant modification comprises S239R.
[1282] 340. The combination of embodiment 334, wherein the ablation variant modification comprises V266D.
[1283] 341. The combination of embodiment 334, wherein the ablation variant modification comprises S267K.
[1284] 342. The combination of embodiment 334, wherein the ablation variant modification comprises S267R.
[1285] 343. The combination of embodiment 334, wherein the ablation variant modification comprises H268K.
[1286] 344. The combination of embodiment 334, wherein the ablation variant modification comprises E269R.
[1287] 345. The combination of embodiment 334, wherein the ablation variant modification comprises 299R.
[1288] 346. The combination of embodiment 334, wherein the ablation variant modification comprises 299K.
[1289] 347. The combination of embodiment 334, wherein the ablation variant modification comprises K322A.
[1290] 348. The combination of embodiment 334, wherein the ablation variant modification comprises A327G.
[1291] 349. The combination of embodiment 334, wherein the ablation variant modification comprises A327L.
[1292] 350. The combination of embodiment 334, wherein the ablation variant modification comprises A327N.
[1293] 351. The combination of embodiment 334, wherein the ablation variant modification comprises A327Q.
[1294] 352. The combination of embodiment 334, wherein the ablation variant modification comprises L328E.
[1295] 353. The combination of embodiment 334, wherein the ablation variant modification comprises L328R.
[1296] 354. The combination of embodiment 334, wherein the ablation variant modification comprises P329A.
[1297] 355. The combination of embodiment 334, wherein the ablation variant modification comprises P329H.
[1298] 356. The combination of embodiment 334, wherein the ablation variant modification comprises P329K.
[1299] 357. The combination of embodiment 334, wherein the ablation variant modification comprises A330L.
[1300] 358. The combination of embodiment 334, wherein the ablation variant modification comprises A330S/P331S.
[1301] 359. The combination of embodiment 334, wherein the ablation variant modification comprises 1332K.
[1302] 360. The combination of embodiment 334, wherein the ablation variant modification comprises 1332R.
[1303] 361. The combination of embodiment 334, wherein the ablation variant modification comprises V266D/A327Q.
[1304] 362. The combination of embodiment 334, wherein the ablation variant modification comprises V266D/P329K.
[1305] 363. The combination of embodiment 334, wherein the ablation variant modification comprises G236R/L328R.
[1306] 364. The combination of embodiment 334, wherein the ablation variant modification comprises E233P/L234V/L235A/G236del/S239K.
[1307] 365. The combination of embodiment 334, wherein the ablation variant modification comprises E233P/L234V/L235A/G236del/S267K.
[1308] 366. The combination of embodiment 334, wherein the ablation variant modification comprises E233P/L234V/L235A/G236del/S239K/A327G.
[1309] 367. The combination of embodiment 334, wherein the ablation variant modification comprises E233P/L234V/L235A/G236del/S267K/A327G.
[1310] 368. The combination of embodiment 334, wherein the ablation variant modification comprises E233P/L234V/L235A/G236del.
[1311] 369. The combination of embodiment 334, wherein the ablation variant modification comprises S239K/S267K.
[1312] 370. The combination of embodiment 334, wherein the ablation variant modification comprises 267K/P329K.
[1313] 371. The combination of embodiment 334, wherein the ablation variant modification comprises D265A/N297A/P329A.
[1314] 372. The combination of embodiment 334, wherein the ablation variant modification comprises D265N/N297D/P329G.
[1315] 373. The combination of embodiment 334, wherein the ablation variant modification comprises D265E/N297Q/P329S.
[1316] 374. The combination of any one of embodiments 333 to 373, wherein both variant Fc regions comprise the ablation variant modification.
[1317] 375. The combination of any one of embodiments 322 to 374, wherein at least one of the Fc regions further comprises pl variant substitutions.
[1318] 376. The combination of embodiment 375 wherein the pl variant substitutions are selected from Table 4.
[1319] 377. The combination of embodiment 376, wherein the pl variant substitutions comprise the substitutions present in pl_ISO(−).
[1320] 378. The combination of embodiment 376, wherein the pl variant substitutions comprise the substitutions present in pl_(−)_isosteric_A.
[1321] 379. The combination of embodiment 376, wherein the pl variant substitutions comprise the substitutions present in pl_(−)_isosteric_B.
[1322] 380. The combination of embodiment 376, wherein the pl variant substitutions comprise the substitutions present in Pl_ISO(+RR).
[1323] 381. The combination of embodiment 376, wherein the pl variant substitutions comprise the substitutions present in pl_ISO(+).
[1324] 382. The combination of embodiment 376, wherein the pl variant substitutions comprise the substitutions present in pl_(+)_isosteric_A.
[1325] 383. The combination of embodiment 376, wherein the pl variant substitutions comprise the substitutions present in pl_(+)_isosteric_B.
[1326] 384. The combination of embodiment 376, wherein the pl variant substitutions comprise the substitutions present in pl_(+)_isosteric_E269Q/E272Q.
[1327] 385. The combination of embodiment 376, wherein the pl variant substitutions comprise the substitutions present in pl_(+)_isosteric_E269Q/E283Q.
[1328] 386. The combination of embodiment 376, wherein the pl variant substitutions comprise the substitutions present in pl_(+)_isosteric_E2720/E283Q.
[1329] 387. The combination of embodiment 376, wherein the pl variant substitutions comprise the substitutions present in pl_(+)_isosteric_E269Q.
[1330] 388. The combination of any one of embodiments 322 to 387, wherein the first and/or second Fc region further comprises one or more amino acid substitution(s) selected from 434A, 434S, 428L, 308F, 2591, 428L/434S, 2591/308F, 4361/428L, 4361 or V/434S, 436V/428L, 252Y, 252Y/254T/256E, 2591/308F/428L, 236A, 239D, 239E, 332E, 332D, 239D/332E, 267D, 267E, 328F, 267E/328F, 236A/332E, 239D/332E/330Y, 239D, 332E/330L, 236R, 328R, 236R/328R, 236N/267E, 243L, 298A and 299T.
[1331] 389. The combination of any one of embodiments 322 to 387, wherein the first and/or second Fc region further comprises the amino acid substitution 434A, 434S or 434V.
[1332] 390. The combination of embodiment 389, wherein the first and/or second Fc region further comprises the amino acid substitution 428L.
[1333] 391. The combination of any one of embodiments 389 to 390, wherein the first and/or second Fc region further the amino acid substitution 308F.
[1334] 392. The combination of any one of embodiments 389 to 391, wherein the first and/or second Fc region further comprises the amino acid substitution 2591.
[1335] 393. The combination of any one of embodiments 389 to 392, wherein the first and/or second Fc region further comprises the amino acid substitution 4361.
[1336] 394. The combination of any one of embodiments 389 to 393, wherein the first and/or second Fc region further comprises the amino acid substitution 252Y.
[1337] 395. The combination of any one of embodiments 389 to 394, wherein the first and/or second Fc region further comprises the amino acid substitution 254T.
[1338] 396. The combination of any one of embodiments 389 to 395, wherein the first and/or second Fc region further comprises the amino acid substitution 256E.
[1339] 397. The combination of any one of embodiments 389 to 396, wherein the first and/or second Fc region further comprises the amino acid substitution 239D or 239E.
[1340] 398. The combination of any one of embodiments 389 to 397, wherein the first and/or second Fc region further comprises the amino acid substitution 332E or 332D.
[1341] 399. The combination of any one of embodiments 389 to 398, wherein the first and/or second Fc region further comprises the amino acid substitution 267D or 267E.
[1342] 400. The combination of any one of embodiments 389 to 399, wherein the first and/or second Fc region further comprises the amino acid substitution 330L.
[1343] 401. The combination of any one of embodiments 389 to 400, wherein the first and/or second Fc region further comprises the amino acid substitution 236R or 236N.
[1344] 402. The combination of any one of embodiments 389 to 401, wherein the first and/or second Fc region further comprises the amino acid substitution 328R.
[1345] 403. The combination of any one of embodiments 389 to 402, wherein the first and/or second Fc region further comprises the amino acid substitution 243L.
[1346] 404. The combination of any one of embodiments 389 to 403, wherein the first and/or second Fc region further comprises the amino acid substitution 298A.
[1347] 405. The combination of any one of embodiments 389 to 404, wherein the first and/or second Fc region further comprises the amino acid substitution 299T.
[1348] 406. The combination of embodiment 322, wherein:
   [1349] (a) the first and second variant Fc regions comprise the amino acid substitutions S364K/E357Q: L368D/K370S;
   [1350] (b) the first and/or second variant Fc regions comprises the ablation variant modifications E233P/L234V/L235A/G236del/S267K, and
   [1351] (c) the first and/or second variant Fc regions comprises the pl variant substitutions N208D/Q295E/N384D/Q418E/N421D (pl_(−)_isosteric_A).
[1352] 407. The combination of embodiment 406, wherein the first variant Fc region comprises the ablation variant modifications E233P/L234V/L235A/G236del/S267K.
[1353] 408. The combination of any one of embodiments 406 to 407, wherein the second variant Fc region comprises the ablation variant modifications E233P/L234V/L235A/G236del/S267K.
[1354] 409. The combination of any one of embodiments 406 to 408, wherein the first variant Fc region comprises the pl variant substitutions N208D/Q295E/N384D/Q418E/N421D (pl_(−)_isosteric_A).
[1355] 410. The combination of any one of embodiments 406 to 409, wherein the second variant Fc region comprises the pl variant substitutions N208D/Q295E/N384D/Q418E/N421D (pl_(−)_isosteric_A).
[1356] 411. The combination of any one of embodiments 322 to 410, wherein the first or second variant Fc region comprises an amino acid sequence which is at least 90% identical to SEQ ID NO:252.
[1357] 412. The combination of any one of embodiments 322 to 410, wherein the first or second variant Fc region comprises an amino acid sequence which is at least 95% identical to SEQ ID NO:252.
[1358] 413. The combination of any one of embodiments 322 to 410, wherein the first or second variant Fc region comprises the amino acid sequence of SEQ ID NO:252 modified with the substitutions recited in any one of embodiments 324 to 410.
[1359] 414. The combination of any one of embodiments 322 to 410, wherein the first or second variant Fc region comprises the amino acid sequence of SEQ ID NO:252 with a substitution at 1, 2, 3, 4, 5 or 6 of positions 233, 234, 235, 236, 237, 239, 265, 266, 267, 268, 269, 297, 299, 322, 327, 328, 329, 330, 331 and 332, optionally wherein one or more of the substitutions are substitutions recited in any one of embodiments 324 to 410.
[1360] 415. The combination of any one of embodiments 322 to 414, wherein the first or second variant Fc region comprises an amino acid sequence which is at least 90% identical to SEQ ID NO:253.
[1361] 416. The combination of any one of embodiments 322 to 414, wherein the first or second variant Fc region comprises an amino acid sequence which is at least 95% identical to SEQ ID NO:253.
[1362] 417. The combination of any one of embodiments 322 to 414, wherein the first or second variant Fc region comprises the amino acid sequence of SEQ ID NO:253 modified with the substitutions recited in any one of embodiments 324 to 410.
[1363] 418. The combination of any one of embodiments 322 to 414, wherein the first or second variant Fc region comprises the amino acid sequence of SEQ ID NO:253 with a substitution at 1, 2, 3, 4, 5 or 6 of positions 233, 234, 235, 236, 237, 239, 265, 266, 267, 268, 269, 297, 299, 322, 327, 328, 329, 330, 331 and 332, optionally wherein one or more of the substitutions are substitutions recited in any one of embodiments 324 to 410.
[1364] 419. The combination of any one of embodiments 322 to 414, wherein the first or second variant Fc region comprises an amino acid sequence which is at least 90% identical to SEQ ID NO:254.
[1365] 420. The combination of any one of embodiments 322 to 414, wherein the first or second variant Fc region comprises an amino acid sequence which is at least 95% identical to SEQ ID NO:254.
[1366] 421. The combination of any one of embodiments 322 to 414, wherein the first or second variant Fc region comprises the amino acid sequence of SEQ ID NO:254 modified with the substitutions recited in any one of embodiments 324 to 410.
[1367] 422. The combination of any one of embodiments 322 to 414, wherein the first or second variant Fc region comprises the amino acid sequence of SEQ ID NO:254 with a substitution at 1, 2, 3, 4, 5 or 6 of positions 233, 234, 235, 236, 237, 239, 265, 266, 267, 268, 269, 297, 299, 322, 327, 328, 329, 330, 331 and 332, optionally wherein one or more of the substitutions are substitutions recited in any one of embodiments 324 to 410.
[1368] 423. The combination of any one of embodiments 322 to 422, wherein the first or second variant Fc region comprises an amino acid sequence which is at least 90% identical to SEQ ID NO:251.
[1369] 424. The combination of any one of embodiments 322 to 422, wherein the first or second variant Fc region comprises an amino acid sequence which is at least 95% identical to SEQ ID NO:251.
[1370] 425. The combination of any one of embodiments 322 to 422, wherein the first or second variant Fc region comprises the amino acid sequence of SEQ ID NO:251 modified with the substitutions recited in any one of embodiments 324 to 410.
[1371] 426. The combination of any one of embodiments 322 to 422, wherein the first or second variant Fc region comprises the amino acid sequence of SEQ ID NO:251 with a substitution at 1, 2, 3, 4, 5 or 6 of positions 233, 234, 235, 236, 237, 239, 265, 266, 267, 268, 269, 297, 299, 322, 327, 328, 329, 330, 331 and 332, optionally wherein one or more of the substitutions are substitutions recited in any one of embodiments 324 to 410.
[1372] 427. The combination of any one of embodiments 40 to 269, wherein the CD19 binding molecule comprises an Fc domain.
[1373] 428. The combination of embodiment 427, wherein the Fc domain is an Fc heterodimer.
[1374] 429. The combination of embodiment 428, wherein the Fc heterodimer comprises any of the Fc modifications set forth in Table 4.
[1375] 430. The combination of embodiment 428, wherein the Fc heterodimer comprises knob-in-hole (“KIH”) modifications.
[1376] 431. The combination of any one of embodiments to 428 to 430, wherein the CD19 binding molecule comprises at least one of the Fc modifications designated as Fc 1 through Fc 150.
[1377] 432. The combination of embodiment 431, wherein the CD19 binding molecule comprises at least one of the Fc modifications designated as Fc 1 through Fc 5.
[1378] 433. The combination of embodiment 431, wherein the CD19 binding molecule comprises at least one of the Fc modifications designated as Fc 6 through Fc 10.
[1379] 434. The combination of embodiment 431, wherein the CD19 binding molecule comprises at least one of the Fc modifications designated as Fc 11 through Fc 15.
[1380] 435. The combination of embodiment 431, wherein the CD19 binding molecule comprises at least one of the Fc modifications designated as Fc 16 through Fc 20.
[1381] 436. The combination of embodiment 431, wherein the CD19 binding molecule comprises at least one of the Fc modifications designated as Fc 21 through Fc 25.
[1382] 437. The combination of embodiment 431, wherein the CD19 binding molecule comprises at least one of the Fc modifications designated as Fc 26 through Fc 30.
[1383] 438. The combination of embodiment 431, wherein the CD19 binding molecule comprises at least one of the Fc modifications designated as Fc 31 through Fc 35.
[1384] 439. The combination of embodiment 431, wherein the CD19 binding molecule comprises at least one of the Fc modifications designated as Fc 36 through Fc 40.
[1385] 440. The combination of embodiment 431, wherein the CD19 binding molecule comprises at least one of the Fc modifications designated as Fc 41 through Fc 45.
[1386] 441. The combination of embodiment 431, wherein the CD19 binding molecule comprises at least one of the Fc modifications designated as Fc 46 through Fc 50.
[1387] 442. The combination of embodiment 431, wherein the CD19 binding molecule comprises at least one of the Fc modifications designated as Fc 51 through Fc 55.
[1388] 443. The combination of embodiment 431, wherein the CD19 binding molecule comprises at least one of the Fc modifications designated as Fc 56 through Fc 60.
[1389] 444. The combination of embodiment 431, wherein the CD19 binding molecule comprises at least one of the Fc modifications designated as Fc 61 through Fc 65.
[1390] 445. The combination of embodiment 431, wherein the CD19 binding molecule comprises at least one of the Fc modifications designated as Fc 66 through Fc 70.
[1391] 446. The combination of embodiment 431, wherein the CD19 binding molecule comprises at least one of the Fc modifications designated as Fc 71 through Fc 75.
[1392] 447. The combination of embodiment 431, wherein the CD19 binding molecule comprises at least one of the Fc modifications designated as Fc 76 through Fc 80.
[1393] 448. The combination of embodiment 431, wherein the CD19 binding molecule comprises at least one of the Fc modifications designated as Fc 81 through Fc 85.
[1394] 449. The combination of embodiment 431, wherein the CD19 binding molecule comprises at least one of the Fc modifications designated as Fc 86 through Fc 90.
[1395] 450. The combination of embodiment 431, wherein the CD19 binding molecule comprises at least one of the Fc modifications designated as Fc 91 through Fc 95.
[1396] 451. The combination of embodiment 431, wherein the CD19 binding molecule comprises at least one of the Fc modifications designated as Fc 96 through Fc 100.
[1397] 452. The combination of embodiment 431, wherein the CD19 binding molecule comprises at least one of the Fc modifications designated as Fc 101 through Fc 105.
[1398] 453. The combination of embodiment 431, wherein the CD19 binding molecule comprises at least one of the Fc modifications designated as Fc 106 through Fc 110.
[1399] 454. The combination of embodiment 431, wherein the CD19 binding molecule comprises at least one of the Fc modifications designated as Fc 111 through Fc 115.
[1400] 455. The combination of embodiment 431, wherein the CD19 binding molecule comprises at least one of the Fc modifications designated as Fc 116 through Fc 120.
[1401] 456. The combination of embodiment 431, wherein the CD19 binding molecule comprises at least one of the Fc modifications designated as Fc 121 through Fc 125.
[1402] 457. The combination of embodiment 431, wherein the CD19 binding molecule comprises at least one of the Fc modifications designated as Fc 126 through Fc 130.
[1403] 458. The combination of embodiment 431, wherein the CD19 binding molecule comprises at least one of the Fc modifications designated as Fc 131 through Fc 135.
[1404] 459. The combination of embodiment 431, wherein the CD19 binding molecule comprises at least one of the Fc modifications designated as Fc 136 through Fc 140.
[1405] 460. The combination of embodiment 431, wherein the CD19 binding molecule comprises at least one of the Fc modifications designated as Fc 141 through Fc 145.
[1406] 461. The combination of embodiment 431, wherein the CD19 binding molecule comprises at least one of the Fc modifications designated as Fc 146 through Fc 150.
[1407] 462. The combination of any one of embodiments 427 to 461, wherein the Fc domain of the CD19 binding molecule has altered effector function.
[1408] 463. The combination of embodiment 462, wherein the Fc domain has altered binding to one or more Fc receptors.
[1409] 464. The combination of embodiment 463, wherein the one or more Fc receptors comprise FcRN.
[1410] 465. The combination of embodiment 463 or embodiment 464, wherein the one or more Fc receptors comprise leukocyte receptors.
[1411] 466. The combination of any one of embodiments 427 to 465, wherein the Fc has modified disulfide bond architecture.
[1412] 467. The combination of any one of embodiments 427 to 466, wherein the Fc has altered glycosylation patterns.
[1413] 468. The combination of any one of embodiments 427 to 467, wherein the Fc comprises a hinge region.
[1414] 469. The combination of embodiment 468, wherein the hinge region comprises any one of the hinge regions described in Section 7.2.2.2
[1415] 470. The combination of embodiment 469, wherein the hinge region comprises the amino acid sequence of the hinge region designated H1.
[1416] 471. The combination of embodiment 469, wherein the hinge region comprises the amino acid sequence of the hinge region designated H2.
[1417] 472. The combination of embodiment 469, wherein the hinge region comprises the amino acid sequence of the hinge region designated H3.
[1418] 473. The combination of embodiment 469, wherein the hinge region comprises the amino acid sequence of the hinge region designated H4.
[1419] 474. The combination of embodiment 469, wherein the hinge region comprises the amino acid sequence of the hinge region designated H5.
[1420] 475. The combination of embodiment 469, wherein the hinge region comprises the amino acid sequence of the hinge region designated H6.
[1421] 476. The combination of embodiment 469, wherein the hinge region comprises the amino acid sequence of the hinge region designated H7.
[1422] 477. The combination of embodiment 469, wherein the hinge region comprises the amino acid sequence of the hinge region designated H8.
[1423] 478. The combination of embodiment 469, wherein the hinge region comprises the amino acid sequence of the hinge region designated H9.
[1424] 479. The combination of embodiment 469, wherein the hinge region comprises the amino acid sequence of the hinge region designated H10.
[1425] 480. The combination of embodiment 469, wherein the hinge region comprises the amino acid sequence of the hinge region designated H11.
[1426] 481. The combination of embodiment 469, wherein the hinge region comprises the amino acid sequence of the hinge region designated H12.
[1427] 482. The combination of embodiment 469, wherein the hinge region comprises the amino acid sequence of the hinge region designated H13.
[1428] 483. The combination of embodiment 469, wherein the hinge region comprises the amino acid sequence of the hinge region designated H14.
[1429] 484. The combination of embodiment 469, wherein the hinge region comprises the amino acid sequence of the hinge region designated H15.
[1430] 485. The combination of embodiment 469, wherein the hinge region comprises the amino acid sequence of the hinge region designated H16.
[1431] 486. The combination of embodiment 469, wherein the hinge region comprises the amino acid sequence of the hinge region designated H17.
[1432] 487. The combination of embodiment 469, wherein the hinge region comprises the amino acid sequence of the hinge region designated H18.
[1433] 488. The combination of embodiment 469, wherein the hinge region comprises the amino acid sequence of the hinge region designated H19.
[1434] 489. The combination of embodiment 469, wherein the hinge region comprises the amino acid sequence of the hinge region designated H20.
[1435] 490. The combination of embodiment 469, wherein the hinge region comprises the amino acid sequence of the hinge region designated H21.
[1436] 491. The combination of any one of embodiments 40 to 490, wherein the CD19 binding molecule comprises at least one scFv domain.
[1437] 492. The combination of embodiment 491, wherein at least one scFv comprises a linker connecting the VH and VL domains.
[1438] 493. The combination of embodiment 492, wherein the linker is 5 to 25 amino acids in length.
[1439] 494. The combination of embodiment 493, wherein the linker is 12 to 20 amino acids in length.
[1440] 495. The combination of any one of embodiments 492 to 494, wherein the linker is a charged linker and/or a flexible linker.
[1441] 496. The combination of any one of embodiments 492 to 495, wherein the linker is selected from any one of linkers L1 through L54.
[1442] 497. The combination of embodiment 496, wherein the linker region comprises the amino acid sequence of the linker designated L1.
[1443] 498. The combination of embodiment 496, wherein the linker region comprises the amino acid sequence of the linker designated L2.
[1444] 499. The combination of embodiment 496, wherein the linker region comprises the amino acid sequence of the linker designated L3.
[1445] 500. The combination of embodiment 496, wherein the linker region comprises the amino acid sequence of the linker designated L4.
[1446] 501. The combination of embodiment 496, wherein the linker region comprises the amino acid sequence of the linker designated L5.
[1447] 502. The combination of embodiment 496, wherein the linker region comprises the amino acid sequence of the linker designated L6.
[1448] 503. The combination of embodiment 496, wherein the linker region comprises the amino acid sequence of the linker designated L7.
[1449] 504. The combination of embodiment 496, wherein the linker region comprises the amino acid sequence of the linker designated L8.
[1450] 505. The combination of embodiment 496, wherein the linker region comprises the amino acid sequence of the linker designated L9.
[1451] 506. The combination of embodiment 496, wherein the linker region comprises the amino acid sequence of the linker designated L10.
[1452] 507. The combination of embodiment 496, wherein the linker region comprises the amino acid sequence of the linker designated L11.
[1453] 508. The combination of embodiment 496, wherein the linker region comprises the amino acid sequence of the linker designated L12.
[1454] 509. The combination of embodiment 496, wherein the linker region comprises the amino acid sequence of the linker designated L13.
[1455] 510. The combination of embodiment 496, wherein the linker region comprises the amino acid sequence of the linker designated L14.
[1456] 511. The combination of embodiment 496, wherein the linker region comprises the amino acid sequence of the linker designated L15.
[1457] 512. The combination of embodiment 496, wherein the linker region comprises the amino acid sequence of the linker designated L16.
[1458] 513. The combination of embodiment 496, wherein the linker region comprises the amino acid sequence of the linker designated L17.
[1459] 514. The combination of embodiment 496, wherein the linker region comprises the amino acid sequence of the linker designated L18.
[1460] 515. The combination of embodiment 496, wherein the linker region comprises the amino acid sequence of the linker designated L19.
[1461] 516. The combination of embodiment 496, wherein the linker region comprises the amino acid sequence of the linker designated L20.
[1462] 517. The combination of embodiment 496, wherein the linker region comprises the amino acid sequence of the linker designated L21.
[1463] 518. The combination of embodiment 496, wherein the linker region comprises the amino acid sequence of the linker designated L22.
[1464] 519. The combination of embodiment 496, wherein the linker region comprises the amino acid sequence of the linker designated L23.
[1465] 520. The combination of embodiment 496, wherein the linker region comprises the amino acid sequence of the linker designated L24.
[1466] 521. The combination of embodiment 496, wherein the linker region comprises the amino acid sequence of the linker designated L25.
[1467] 522. The combination of embodiment 496, wherein the linker region comprises the amino acid sequence of the linker designated L26.
[1468] 523. The combination of embodiment 496, wherein the linker region comprises the amino acid sequence of the linker designated L27.
[1469] 524. The combination of embodiment 496, wherein the linker region comprises the amino acid sequence of the linker designated L28.
[1470] 525. The combination of embodiment 496, wherein the linker region comprises the amino acid sequence of the linker designated L29.
[1471] 526. The combination of embodiment 496, wherein the linker region comprises the amino acid sequence of the linker designated L30.
[1472] 527. The combination of embodiment 496, wherein the linker region comprises the amino acid sequence of the linker designated L31.
[1473] 528. The combination of embodiment 496, wherein the linker region comprises the amino acid sequence of the linker designated L32.
[1474] 529. The combination of embodiment 496, wherein the linker region comprises the amino acid sequence of the linker designated L33.
[1475] 530. The combination of embodiment 496, wherein the linker region comprises the amino acid sequence of the linker designated L34.
[1476] 531. The combination of embodiment 496, wherein the linker region comprises the amino acid sequence of the linker designated L35.
[1477] 532. The combination of embodiment 496, wherein the linker region comprises the amino acid sequence of the linker designated L36.
[1478] 533. The combination of embodiment 496, wherein the linker region comprises the amino acid sequence of the linker designated L37.
[1479] 534. The combination of embodiment 496, wherein the linker region comprises the amino acid sequence of the linker designated L38.
[1480] 535. The combination of embodiment 496, wherein the linker region comprises the amino acid sequence of the linker designated L39.
[1481] 536. The combination of embodiment 496, wherein the linker region comprises the amino acid sequence of the linker designated L40.
[1482] 537. The combination of embodiment 496, wherein the linker region comprises the amino acid sequence of the linker designated L41.
[1483] 538. The combination of embodiment 496, wherein the linker region comprises the amino acid sequence of the linker designated L42.
[1484] 539. The combination of embodiment 496, wherein the linker region comprises the amino acid sequence of the linker designated L43.
[1485] 540. The combination of embodiment 496, wherein the linker region comprises the amino acid sequence of the linker designated L44.
[1486] 541. The combination of embodiment 496, wherein the linker region comprises the amino acid sequence of the linker designated L45.
[1487] 542. The combination of embodiment 496, wherein the linker region comprises the amino acid sequence of the linker designated L46.
[1488] 543. The combination of embodiment 496, wherein the linker region comprises the amino acid sequence of the linker designated L47.
[1489] 544. The combination of embodiment 496, wherein the linker region comprises the amino acid sequence of the linker designated L48.
[1490] 545. The combination of embodiment 496, wherein the linker region comprises the amino acid sequence of the linker designated L49.
[1491] 546. The combination of embodiment 496, wherein the linker region comprises the amino acid sequence of the linker designated L50.
[1492] 547. The combination of embodiment 496, wherein the linker region comprises the amino acid sequence of the linker designated L51.
[1493] 548. The combination of embodiment 496, wherein the linker region comprises the amino acid sequence of the linker designated L52.
[1494] 549. The combination of embodiment 496, wherein the linker region comprises the amino acid sequence of the linker designated L53.
[1495] 550. The combination of embodiment 496, wherein the linker region comprises the amino acid sequence of the linker designated L54.
[1496] 551. The combination of any one of embodiments 40 to 550, wherein the CD19 binding molecule comprises at least one Fab domain.
[1497] 552. The combination of embodiment 551, wherein at least one Fab domain comprises any of the Fab heterodimerization modifications set forth in Table 2.
[1498] 553. The combination of embodiment 552, wherein at least one Fab domain comprises the Fab heterodimerization modifications designated as F1.
[1499] 554. The combination of embodiment 552, wherein at least one Fab domain comprises the Fab heterodimerization modifications designated as F2.
[1500] 555. The combination of embodiment 552, wherein at least one Fab domain comprises the Fab heterodimerization modifications designated as F3.
[1501] 556. The combination of embodiment 552, wherein at least one Fab domain comprises the Fab heterodimerization modifications designated as F4.
[1502] 557. The combination of embodiment 552, wherein at least one Fab domain comprises the Fab heterodimerization modifications designated as F5.
[1503] 558. The combination of embodiment 552, wherein at least one Fab domain comprises the Fab heterodimerization modifications designated as F6.
[1504] 559. The combination of embodiment 552, wherein at least one Fab domain comprises the Fab heterodimerization modifications designated as F7.
[1505] 560. The combination of any one of embodiments 40 to 559, wherein the CD19 binding molecule comprises at least two ABMs, an ABM and an ABM chain, or two ABM chains connected to one another via a linker.
[1506] 561. The combination of embodiment 560, wherein the linker is 5 to 25 amino acids in length.
[1507] 562. The combination of embodiment 561, wherein the linker is 12 to 20 amino acids in length.
[1508] 563. The combination of any one of embodiments 560 to 562, wherein the linker is a charged linker and/or a flexible linker.
[1509] 564. The combination of any one of embodiments 560 to 563, wherein the linker is selected from any one of linkers L1 through L54.
[1510] 565. The combination of embodiment 2, wherein the CD19 binding molecule is trispecific binding molecule (TBM) comprising:
   [1511] (a) an antigen-binding module 1 (ABM1) that binds specifically to CD19 and comprises CDR-H1, CDR-H2, and CDR-H3 having the amino acid sequences of SEQ ID NO:4, SEQ ID NO:5, and SEQ ID NO:6, and CDR-L1, CDR-L2, and CDR-L3 having the amino acid sequences of SEQ ID NO:17, SEQ ID NO:18, and SEQ ID NO:19;
   [1512] (b) an antigen-binding module 2 (ABM2) that binds specifically to a component of a human T-cell receptor (TCR) complex; and
   [1513] (c) an antigen-binding module 3 (ABM3) that binds specifically to human CD2.
[1514] 566. The combination of embodiment 565, wherein the CD19 binding molecule is trivalent.
[1515] 567. The combination of embodiment 565 or 566, in which ABM1 is a Fab.
[1516] 568. The combination of any one of embodiments 565 to 567, wherein ABM1 comprises a VH having the amino acid sequence of SEQ ID NO:13 and a VL having the amino acid sequence of SEQ ID NO:26.
[1517] 569. The combination of any one of embodiments 565 to 569, wherein the component of the TCR complex is CD3.
[1518] 570. The combination of embodiment 569, wherein ABM2 is an anti-CD3 antibody or an antigen-binding domain thereof.
[1519] 571. The combination of embodiment 570, wherein ABM2 comprises the CDR sequences of CD3hi.
[1520] 572. The combination of embodiment 570 or 571, wherein ABM2 comprises the heavy and light chain variable sequences of CD3hi, as set forth in Table 9A.
[1521] 573. The combination of any one of embodiments 570 to 572, wherein the anti-CD3 antibody or antigen-binding domain thereof is in the form of a scFv.
[1522] 574. The combination of embodiment 573, wherein ABM2 comprises the amino acid sequence of the scFv designated as CD3hi in Table 9A.
[1523] 575. The combination of any one of embodiments 565 to 574, wherein ABM3 is a CD58 moiety.
[1524] 576. The combination of any one of embodiments 565 to 575, wherein ABM3 comprises the amino acid sequence of CD58-6 as set forth in Table 12.
[1525] 577. The combination of any one of embodiments 565 to 576, which comprises an Fc domain.
[1526] 578. The combination of any one of embodiments 565 to 576, which comprises a first variant Fc region and a second variant Fc region that together form an Fc heterodimer.
[1527] 579. The combination of embodiment 2, wherein the CD19 binding molecule is a trispecific binding molecule (TBM) comprising:
   [1528] (a) an antigen-binding module 1 (ABM1) that binds specifically to CD19 and which is a Fab comprising: (i) CDR-H1, CDR-H2, and CDR-H3 having the amino acid sequences of SEQ ID NO:4, SEQ ID NO:5, and SEQ ID NO:6, and CDR-L1, CDR-L2, and CDR-L3 having the amino acid sequences of SEQ ID NO:17, SEQ ID NO:18, and SEQ ID NO:19; or (ii) CDR-H1, CDR-H2, and CDR-H3 having the amino acid sequences of SEQ ID NO:30, SEQ ID NO:31, and SEQ ID NO:32, and CDR-L1, CDR-L2, and CDR-L3 having the amino acid sequences of SEQ ID NO:43, SEQ ID NO:44, and SEQ ID NO:45;
   [1529] (b) an antigen-binding module 2 (ABM2) that binds specifically to CD3 and which comprises the amino acid sequence of the scFv designated as CD3hi in Table 9A;
   [1530] (c) an antigen-binding module 3 (ABM3) that binds specifically to human CD2 and which comprises the amino acid sequence of CD58-6 as set forth in Table 12; and
   [1531] (d) an Fc domain.
[1532] 580. The combination of embodiment 2, wherein the CD19 binding molecule is a trispecific binding molecule (TBM) comprising:
   [1533] (a) an antigen-binding module 1 (ABM1) that binds specifically to CD19 and which is a Fab comprising: (i) CDR-H1, CDR-H2, and CDR-H3 having the amino acid sequences of SEQ ID NO:4, SEQ ID NO:5, and SEQ ID NO:6, and CDR-L1, CDR-L2, and CDR-L3 having the amino acid sequences of SEQ ID NO:17, SEQ ID NO:18, and SEQ ID NO:19; or (ii) CDR-H1, CDR-H2, and CDR-H3 having the amino acid sequences of SEQ ID NO:30, SEQ ID NO:31, and SEQ ID NO:32, and CDR-L1, CDR-L2, and CDR-L3 having the amino acid sequences of SEQ ID NO:43, SEQ ID NO:44, and SEQ ID NO:45;
   [1534] (b) an antigen-binding module 2 (ABM2) that binds specifically to CD3 and which comprises the amino acid sequence of the scFv designated as CD3hi in Table 9A;
   [1535] (c) an antigen-binding module 3 (ABM3) that binds specifically to human CD2 and which comprises the amino acid sequence of CD58-6 as set forth in Table 12; and
   [1536] (d) an Fc domain.
[1537] 581. The combination of embodiment 579 or embodiment 580, wherein ABM1 comprises CDR-H1, CDR-H2, and CDR-H3 having the amino acid sequences of SEQ ID NO:4, SEQ ID NO:5, and SEQ ID NO:6, and CDR-L1, CDR-L2, and CDR-L3 having the amino acid sequences of SEQ ID NO:17, SEQ ID NO:18, and SEQ ID NO:19.
[1538] 582. The combination of any one of embodiments 579 to 581, wherein ABM1 comprises a VH having the amino acid sequence of SEQ ID NO:13 and a VL having the amino acid sequence of SEQ ID NO:26.
[1539] 583. The combination of any one of embodiments 565 to 582, wherein the CD19 binding molecule has the configuration depicted in FIG. 21 and referred to as T2 in Section 7.2.4.1.
[1540] 584. The combination of any one of embodiments 565 to 583, wherein the CD19 binding molecule comprises an Fc domain which is an Fc heterodimer.
[1541] 585. The combination of embodiment 584, wherein the Fc heterodimer of the CD19 binding molecule comprises knob-in-hole (“KIH”) modifications.
[1542] 586. The combination of embodiment 585, wherein the CD19 binding molecule comprises at least one of the Fc modifications designated as Fc 121 through Fc 125.
[1543] 587. The combination of any one of embodiments 584 to 586, wherein the Fc domain of the CD19 binding molecule has altered effector function.
[1544] 588. The combination of embodiment 587, wherein the Fc domain of the CD19 binding molecule has altered binding to one or more Fc receptors.
[1545] 589. The combination of any one of embodiments 584 to 588, wherein the Fc domain of the CD19 binding molecule is a silent IgG1 comprising the D265A mutation.
[1546] 590. The combination of any one of embodiments 584 to 589, wherein the Fc domain of the CD19 binding molecule is a silent IgG1 comprising the D265A and P329A mutations.
[1547] 591. The combination of any one of embodiments 565 to 590, wherein: the antigen-binding module 1 (ABM1) that binds specifically to CD19 comprises a VH is fused to a constant human IgG1 domain CH1 and a VL fused to a constant human kappa sequence.
[1548] 592. The combination of any one of embodiments 584 to 591, wherein the Fc domain of the CD19 binding molecule is a human IgG1 Fc domain which comprises:
   [1549] (a) a first CH3 domain comprising the modification T366W; and
   [1550] (b) a second CH3 domain that heterodimerizes with the first CH3 domain and comprises the modifications T366S, L368A and Y407V.
[1551] 593. The combination of any one of embodiments 584 to 592, wherein the Fc domain of the CD19 binding molecule is a human IgG1 Fc domain which comprises:
   [1552] (a) a first CH3 domain comprising the modification S354C and
   [1553] (b) a second CH3 domain comprises the modification Y349C.
[1554] 594. The combination of any one of embodiments 584 to 593, wherein the Fc domain of the CD19 binding molecule comprises a human IgG1 sequence of SEQ ID NO:251 with a mutation at 1, 2, 3, 4, 5 or 6 positions of positions 233, 234, 235, 236, 237, 239, 265, 266, 267, 268, 269, 297, 299, 322, 327, 328, 329, 330, 331 and 332 (EU numbering).
[1555] 595. The combination of any one of embodiments 584 to 594, wherein the Fc domain of the CD19 binding molecule comprises a human IgG1 Fc domain modified by substituting the aspartate residue at position 265 with an alanine residue, the asparagine residue at position 297 with an alanine residue and the proline residue at position 329 with an alanine residue (D265A/N297A/P329A).
[1556] 596. The combination of any one of embodiments 582 to 595, wherein in the CD19 binding molecule a) the VH is fused to a constant human IgG1 CH1 domain and is joined by a linker to b) an antigen-binding module 2 (ABM2) that binds specifically to CD3 which comprises an scFv.
[1557] 597. The combination of any of embodiments 582 to 595, wherein a) the VH is fused to a constant human IgG1 CH1 domain and is joined by a linker to b) an antigen-binding module 2 (ABM2) that binds specifically to CD3 which comprises an scFv which is joined by a linker to the d) Fc domain.
[1558] 598. The combination of any of embodiments 565 to 597, wherein the CD19 binding molecule comprises a first half antibody comprising a) an antigen-binding module 1 (ABM1) that binds specifically to CD19; b) an antigen-binding module 2 (ABM2) that binds specifically to CD3 and which comprises an scFv and d) an Fc region; and a second half antibody comprising an antigen-binding module 3 (ABM3) that binds specifically to human CD2 and which comprises a CD58 IgV domain and d) an Fc region, wherein the Fc region in the first half antibody and the Fc region in the second half antibody form a Fc heterodimer.
[1559] 599. The combination of embodiment 598, wherein the CD19 binding molecule comprises a first half antibody which comprises a heavy chain comprising the amino acid sequence of SEQ ID NO:63; and a light chain comprising the amino acid sequence of SEQ ID NO:64; and a second half antibody comprising the amino acid sequence of SEQ ID NO:65.
[1560] 600. The combination of embodiment 598, wherein the CD19 binding molecule comprises a first half antibody which comprises a heavy chain comprising the amino acid sequence of SEQ ID NO:74; and a light chain comprising the amino acid sequence of SEQ ID NO:64; and a second half antibody comprising the amino acid sequence of SEQ ID NO:75 or SEQ ID NO:86.
[1561] 601. The combination of embodiment 2, wherein the CD19 binding molecule comprises:
   [1562] (a) first half antibody heavy chain whose amino acid sequence comprises the amino acid sequence of SEQ ID NO:63 and a Fc sequence;
   [1563] (b) a first half antibody light chain whose amino acid sequence comprises the amino acid sequence of SEQ ID NO:64;
   [1564] (c) a second half antibody whose amino acid sequence comprises the amino acid sequence of SEQ ID NO:65 and a Fc sequence.
[1565] 602. The combination of embodiment 2, wherein the CD19 binding molecule comprises:
   [1566] (a) a first polypeptide whose amino acid sequence comprises the amino acid sequence of SEQ ID NO:74;
   [1567] (b) a second polypeptide whose amino acid sequence comprises the amino acid sequence of SEQ ID NO:64; and
   [1568] (c) a third polypeptide whose amino acid sequence comprises the amino acid sequence of SEQ ID NO:75 or SEQ ID NO:86.
[1569] 603. The combination of embodiment 2, wherein the CD19 binding molecule comprises:
   [1570] (a) a first polypeptide whose amino acid sequence comprises the amino acid sequence of SEQ ID NO:76;
   [1571] (b) a second polypeptide whose amino acid sequence comprises the amino acid sequence of SEQ ID NO:64; and
   [1572] (c) a third polypeptide whose amino acid sequence comprises the amino acid sequence of SEQ ID NO:75 or SEQ ID NO:86.
[1573] 604. The combination of embodiment 2, wherein the CD19 binding molecule comprises:
   [1574] (a) a first polypeptide whose amino acid sequence comprises the amino acid sequence of SEQ ID NO:74;
   [1575] (b) a second polypeptide whose amino acid sequence comprises the amino acid sequence of SEQ ID NO:64; and
   [1576] (c) a third polypeptide whose amino acid sequence comprises the amino acid sequence of SEQ ID NO:86.
[1577] 605. The combination of embodiment 2, wherein the CD19 binding molecule comprises:
   [1578] (a) a first polypeptide whose amino acid sequence comprises the amino acid sequence of SEQ ID NO:1120;
   [1579] (b) a second polypeptide whose amino acid sequence comprises the amino acid sequence of SEQ ID NO: 1122; and
   [1580] (c) a third polypeptide whose amino acid sequence comprises the amino acid sequence of SEQ ID NO:1110.
[1581] 606. The combination of embodiment 2, wherein the CD19 binding molecule comprises:
   [1582] (a) a first polypeptide whose amino acid sequence comprises the amino acid sequence of SEQ ID NO:1127;
   [1583] (b) a second polypeptide whose amino acid sequence comprises the amino acid sequence of SEQ ID NO: 1129; and
   [1584] (c) a third polypeptide whose amino acid sequence comprises the amino acid sequence of SEQ ID NO:1110.
[1585] 607. The combination of embodiment 2, wherein the CD19 binding molecule comprises:
   [1586] (a) a first polypeptide whose amino acid sequence comprises the amino acid sequence of SEQ ID NO:1124;
   [1587] (b) a second polypeptide whose amino acid sequence comprises the amino acid sequence of SEQ ID NO: 1126; and
   [1588] (c) a third polypeptide whose amino acid sequence comprises the amino acid sequence of SEQ ID NO:1110.
[1589] 608. The combination of embodiment 2, wherein the CD19 binding molecule comprises:
   [1590] (a) a first polypeptide whose amino acid sequence comprises the amino acid sequence of SEQ ID NO:1134;
   [1591] (b) a second polypeptide whose amino acid sequence comprises the amino acid sequence of SEQ ID NO: 1135; and
   [1592] (c) a third polypeptide whose amino acid sequence comprises the amino acid sequence of SEQ ID NO:1110.
[1593] 609. The combination of embodiment 2, wherein the CD19 binding molecule comprises:
   [1594] (a) a first polypeptide whose amino acid sequence comprises the amino acid sequence of SEQ ID NO:1136;
   [1595] (b) a second polypeptide whose amino acid sequence comprises the amino acid sequence of SEQ ID NO: 1137; and
   [1596] (c) a third polypeptide whose amino acid sequence comprises the amino acid sequence of SEQ ID NO:1110.
[1597] 610. The combination of embodiment 2, wherein the CD19 binding molecule comprises:
   [1598] (a) a first polypeptide whose amino acid sequence comprises the amino acid sequence of SEQ ID NO:1138;
   [1599] (b) a second polypeptide whose amino acid sequence comprises the amino acid sequence of SEQ ID NO: 1139; and
   [1600] (c) a third polypeptide whose amino acid sequence comprises the amino acid sequence of SEQ ID NO:1110.
[1601] 611. The combination of embodiment 2, wherein the CD19 binding molecule comprises:
   [1602] (a) a first polypeptide whose amino acid sequence comprises the amino acid sequence of SEQ ID NO:1140;
   [1603] (b) a second polypeptide whose amino acid sequence comprises the amino acid sequence of SEQ ID NO:1141; and
   [1604] (c) a third polypeptide whose amino acid sequence comprises the amino acid sequence of SEQ ID NO:1110.
[1605] 612. The combination of embodiment 2, wherein the CD19 binding molecule comprises:
   [1606] (a) a first polypeptide whose amino acid sequence comprises the amino acid sequence of SEQ ID NO:1131;
   [1607] (b) a second polypeptide whose amino acid sequence comprises the amino acid sequence of SEQ ID NO: 1132; and
   [1608] (c) a third polypeptide whose amino acid sequence comprises the amino acid sequence of SEQ ID NO: 1133.
[1609] 613. The combination of embodiment 2, wherein the CD19 binding molecule comprises the sequences of a construct shown in Table 20A-1, 20A-2, 20B, or 20C, preferably Table 20C.
[1610] 614. The combination of embodiment 2, wherein the CD19 binding molecule is blinatumomab.
[1611] 615. The combination of embodiment 2, wherein the CD19 binding molecule is coltuximab ravtansine.
[1612] 616. The combination of embodiment 2, wherein the CD19 binding molecule is MOR208.
[1613] 617. The combination of embodiment 2, wherein the CD19 binding molecule is MEDI-551.
[1614] 618. The combination of embodiment 2, wherein the CD19 binding molecule is denintuzumab mafodotin.
[1615] 619. The combination of embodiment 2, wherein the CD19 binding molecule is DI-B4.
[1616] 620. The combination of embodiment 2, wherein the CD19 binding molecule is taplitumomabpaptox.
[1617] 621. The combination of embodiment 2, wherein the CD19 binding molecule is XmAb 5871.
[1618] 622. The combination of embodiment 2, wherein the CD19 binding molecule is MDX-1342.
[1619] 623. The combination of embodiment 2, wherein the CD19 binding molecule is AFM11.
[1620] 624. The combination of embodiment 2, wherein the CD19 binding molecule is MDX-1342.
[1621] 625. The combination of embodiment 2, wherein the CD19 binding molecule is loncastuximab tesirine.
[1622] 626. The combination of embodiment 2, wherein the CD19 binding molecule is GBR401.
[1623] 627. The combination of embodiment 1, wherein the anti-CD19 agent is a population of cells that expresses a chimeric antigen receptor (“CAR”) molecule that binds CD19 (“a CAR composition”).
[1624] 628. The combination of embodiment 627, wherein the CAR molecule comprises an anti-CD19 binding domain, a transmembrane domain, and an intracellular signaling domain.
[1625] 629. The combination of embodiment 628, wherein the intracellular signaling domain comprises a costimulatory domain and a primary signaling domain.
[1626] 630. The combination of embodiment 628 or embodiment 629, wherein the CAR molecule comprises an anti-CD19 binding domain comprising a light chain complementary determining region 1 (CDR-11), a light chain complementary determining region 2 (CDR-L2), a light chain complementary determining region 3 (CDR-L3), a heavy chain complementary determining region 1 (CDR-H1), a heavy chain complementary determining region 2 (CDR-H2), and a heavy chain complementary determining region 3 (CDR-H3) of an anti-CD19 binding domain.
[1627] 631. The combination of any one of embodiments 628 to 630, wherein the CAR molecule comprises an scFv.
[1628] 632. The combination of embodiment 631, wherein the anti-CD19 binding domain is a scFv comprising a heavy chain variable region (VH) attached to a heavy chain light region (VL) via a linker.
[1629] 633. The combination of embodiment 632, wherein the linker comprises the amino acid sequence of SEQ ID NO:144.
[1630] 634. The combination of any one of embodiments 628 to 633, wherein the CAR molecule is a murine CAR molecule.
[1631] 635. The combination of any one of embodiments 628 to 634, wherein the CAR molecule comprises one or more of CDR-H1, CDR-H2 and CDR-H3 of any CD19 scFv domain amino acid sequence listed in Table 17 and one or more of CDR-L1, CDR-L2 and CDR-L3 of any CD19 scFv domain amino acid sequence listed in Table 17.
[1632] 636. The combination of any one of embodiments 628 to 635, wherein the CAR molecule comprises a VH of any CD19 scFv domain amino acid sequence listed in Table 17 and a VL of any CD19 scFv domain amino acid sequence listed in Table 17.
[1633] 637. The combination of any one of embodiments 628 to 636, wherein the CAR molecule comprises a CD19 scFv domain having an amino acid that is at least 95% identical to a CD19 scFv amino acid sequence listed in Table 17.
[1634] 638. The combination of embodiment 637, wherein the CD19 scFv domain comprises the amino acid sequence of SEQ ID NO:149 or an amino acid sequence having at least 95% sequence identity to the amino acid sequence of SEQ ID NO:149.
[1635] 639. The combination of embodiment 637, wherein the CD19 scFv domain comprises the amino acid sequence of SEQ ID NO:194 or an amino acid sequence having at least 95% sequence identity to the amino acid sequence of SEQ ID NO:194.
[1636] 640. The combination of embodiment 637, wherein the CD19 scFv domain comprises the amino acid sequence of SEQ ID NO:196 or an amino acid sequence having at least 95% sequence identity to the amino acid sequence of SEQ ID NO:196.
[1637] 641. The combination of embodiment 637, wherein the CD19 scFv domain comprises the amino acid sequence of SEQ ID NO:199 or an amino acid sequence having at least 95% sequence identity to the amino acid sequence of SEQ ID NO:199.
[1638] 642. The combination of any one of embodiments 628 to 636, wherein the CAR molecule comprises a full-length CD19 CAR amino acid sequence listed in Table 17 or an amino acid sequence having at least 95% sequence identity to a full-length CD19 CAR amino acid sequence listed in Table 17.
[1639] 643. The combination of embodiment 642, wherein the CAR molecule comprises the amino acid sequence of SEQ ID NO:195 or an amino acid sequence having at least 95% sequence identity to the amino acid sequence of SEQ ID NO:195.
[1640] 644. The combination of embodiment 642, wherein the CAR molecule comprises the amino acid sequence of SEQ ID NO:197 or an amino acid sequence having at least 95% sequence identity to the amino acid sequence of SEQ ID NO:197.
[1641] 645. The combination of embodiment 642, wherein the CAR molecule comprises the amino acid sequence of SEQ ID NO:198 or an amino acid sequence having at least 95% sequence identity to the amino acid sequence of SEQ ID NO:198.
[1642] 646. The combination of embodiment 642, wherein the CAR molecule comprises the amino acid sequence of SEQ ID NO:200 or an amino acid sequence having at least 95% sequence identity to the amino acid sequence of SEQ ID NO:200.
[1643] 647. The combination of embodiment 642, wherein the CAR molecule comprises the amino acid sequence of residues 22-486 of SEQ ID NO:148 or an amino acid sequence having at least 95% sequence identity to the amino acid sequence of residues 22-486 of SEQ ID NO:148.
[1644] 648. The combination of any one of embodiments 628 to 633, wherein the CAR molecule is a humanized CAR molecule.
[1645] 649. The combination of any one of embodiments 628 to 633 and 648, wherein the CAR molecule comprises one or more of CDR-H1, CDR-H2 and CDR-H3 of any CD19 scFv domain amino acid sequence listed in Table 16 and one or more of CDR-L1, CDR-L2 and CDR-L3 of any CD19 scFv domain amino acid sequence listed in Table 16.
[1646] 650. The combination of any one of embodiments 628 to 633, 648 and 649, wherein the CAR molecule comprises a VH of any CD19 scFv domain amino acid sequence listed in Table 16 and a VL of any CD19 scFv domain amino acid sequence listed in Table 16.
[1647] 651. The combination of any one of embodiments 628 to 633 and 648 to 650, wherein the CAR molecule comprises a CD19 scFv domain amino acid sequence listed in Table 16 or an amino acid sequence having at least 95% sequence identity to a CD19 scFv domain amino acid sequence listed in Table 16.
[1648] 652. The combination of embodiment 651, wherein the CD19 scFv domain comprises the amino acid sequence of SEQ ID NO:96 or an amino acid sequence having at least 95% sequence identity to the amino acid sequence of SEQ ID NO:96.
[1649] 653. The combination of embodiment 651, wherein the CD19 scFv domain comprises the amino acid sequence of SEQ ID NO:97 or an amino acid sequence having at least 95% sequence identity to the amino acid sequence of SEQ ID NO:97.
[1650] 654. The combination of embodiment 651, wherein the CD19 scFv domain comprises the amino acid sequence of SEQ ID NO:98 or an amino acid sequence having at least 95% sequence identity to the amino acid sequence of SEQ ID NO:98.
[1651] 655. The combination of embodiment 651, wherein the CD19 scFv domain comprises the amino acid sequence of SEQ ID NO:99 or an amino acid sequence having at least 95% sequence identity to the amino acid sequence of SEQ ID NO:99.
[1652] 656. The combination of embodiment 651, wherein the CD19 scFv domain comprises the amino acid sequence of SEQ ID NO:100 or an amino acid sequence having at least 95% sequence identity to the amino acid sequence of SEQ ID NO:100.
[1653] 657. The combination of embodiment 651, wherein the CD19 scFv domain comprises the amino acid sequence of SEQ ID NO:101 or an amino acid sequence having at least 95% sequence identity to the amino acid sequence of SEQ ID NO:101.
[1654] 658. The combination of embodiment 651, wherein the CD19 scFv domain comprises the amino acid sequence of SEQ ID NO:102 or an amino acid sequence having at least 95% sequence identity to the amino acid sequence of SEQ ID NO:102.
[1655] 659. The combination of embodiment 651, wherein the CD19 scFv domain comprises the amino acid sequence of SEQ ID NO:103 or an amino acid sequence having at least 95% sequence identity to the amino acid sequence of SEQ ID NO:103.
[1656] 660. The combination of embodiment 651, wherein the CD19 scFv domain comprises the amino acid sequence of SEQ ID NO:104 or an amino acid sequence having at least 95% sequence identity to the amino acid sequence of SEQ ID NO:104.
[1657] 661. The combination of embodiment 651, wherein the CD19 scFv domain comprises the amino acid sequence of SEQ ID NO:105 or an amino acid sequence having at least 95% sequence identity to the amino acid sequence of SEQ ID NO:105.
[1658] 662. The combination of embodiment 651, wherein the CD19 scFv domain comprises the amino acid sequence of SEQ ID NO:106 or an amino acid sequence having at least 95% sequence identity to the amino acid sequence of SEQ ID NO:106.
[1659] 663. The combination of embodiment 651, wherein the CD19 scFv domain comprises the amino acid sequence of SEQ ID NO:107 or an amino acid sequence having at least 95% sequence identity to the amino acid sequence of SEQ ID NO:107.
[1660] 664. The combination of any one of embodiments 628 to 633 and 648 to 651, wherein the CAR molecule comprises a full-length CD19 CAR amino acid sequence listed in Table 16 or an amino acid sequence having at least 95% sequence identity to a CD19 scFv domain amino acid sequence listed in Table 16.
[1661] 665. The combination of embodiment 664, wherein the CAR molecule comprises the amino acid sequence of residues 22-486 of any one of SEQ ID NOs: 122-125 or 133, residues 22-491 of any one of SEQ ID NOs: 126-132, or an amino acid having at least 95% sequence identity to any of the foregoing sequences.
[1662] 666. The combination of embodiment 665, wherein the CAR molecule comprises the amino acid sequence of residues 22-486 of SEQ ID NO:122 or an amino acid sequence having at least 95% sequence identity to residues 22-486 of SEQ ID NO:122.
[1663] 667. The combination of embodiment 665, wherein the CAR molecule comprises the amino acid sequence of residues 22-486 of SEQ ID NO:123 or an amino acid sequence having at least 95% sequence identity to residues 22-486 of SEQ ID NO:123.
[1664] 668. The combination of embodiment 665, wherein the CAR molecule comprises the amino acid sequence of residues 22-486 of SEQ ID NO:124 or an amino acid sequence having at least 95% sequence identity to residues 22-486 of SEQ ID NO:124.
[1665] 669. The combination of embodiment 665, wherein the CAR molecule comprises the amino acid sequence of residues 22-486 of SEQ ID NO:125 or an amino acid sequence having at least 95% sequence identity to residues 22-486 of SEQ ID NO:125.
[1666] 670. The combination of embodiment 665, wherein the CAR molecule comprises the amino acid sequence of residues 22-486 of SEQ ID NO:133 or an amino acid sequence having at least 95% sequence identity to residues 22-486 of SEQ ID NO:133.
[1667] 671. The combination of embodiment 665, wherein the CAR molecule comprises the amino acid sequence of residues 22-491 of SEQ ID NO:126 or an amino acid sequence having at least 95% sequence identity to residues 22-491 of SEQ ID NO:126.
[1668] 672. The combination of embodiment 665, wherein the CAR molecule comprises the amino acid sequence of residues 22-491 of SEQ ID NO:127 or an amino acid sequence having at least 95% sequence identity to residues 22-491 of SEQ ID NO:127.
[1669] 673. The combination of embodiment 665, wherein the CAR molecule comprises the amino acid sequence of residues 22-491 of SEQ ID NO:128 or an amino acid sequence having at least 95% sequence identity to residues 22-491 of SEQ ID NO:128.
[1670] 674. The combination of embodiment 665, wherein the CAR molecule comprises the amino acid sequence of residues 22-491 of SEQ ID NO:129 or an amino acid sequence having at least 95% sequence identity to residues 22-491 of SEQ ID NO:129.
[1671] 675. The combination of embodiment 665, wherein the CAR molecule comprises the amino acid sequence of residues 22-491 of SEQ ID NO:130 or an amino acid sequence having at least 95% sequence identity to residues 22-491 of SEQ ID NO:130.
[1672] 676. The combination of embodiment 665, wherein the CAR molecule comprises the amino acid sequence of residues 22-491 of SEQ ID NO:131 or an amino acid sequence having at least 95% sequence identity to residues 22-491 of SEQ ID NO:131.
[1673] 677. The combination of embodiment 665, wherein the CAR molecule comprises the amino acid sequence of residues 22-491 of SEQ ID NO:132 or an amino acid sequence having at least 95% sequence identity to residues 22-491 of SEQ ID NO:132.
[1674] 678. The combination of any one of embodiments 628 to 633, wherein the anti-CD19 binding domain comprises CDR-H1, CDR-H2, and CDR-H3 having the amino acid sequences of SEQ ID NO:1, SEQ ID NO:2, and SEQ ID NO:3, and CDR-L1, CDR-L2, and CDR-L3 having the amino acid sequences of SEQ ID NO:14, SEQ ID NO:15, and SEQ ID NO:16.
[1675] 679. The combination of any one of embodiments 628 to 633, wherein the anti-CD19 binding domain comprises CDR-H1, CDR-H2, and CDR-H3 having the amino acid sequences of SEQ ID NO:4, SEQ ID NO:5, and SEQ ID NO:6, and CDR-L1, CDR-L2, and CDR-L3 having the amino acid sequences of SEQ ID NO:17, SEQ ID NO:18, and SEQ ID NO:19.
[1676] 680. The combination of any one of embodiments 628 to 633, wherein the anti-CD19 binding domain comprises CDR-H1, CDR-H2, and CDR-H3 having the amino acid sequences of SEQ ID NO:7, SEQ ID NO:8, and SEQ ID NO:9, and CDR-L1, CDR-L2, and CDR-L3 having the amino acid sequences of SEQ ID NO:20, SEQ ID NO:21, and SEQ ID NO:22.
[1677] 681. The combination of any one of embodiments 628 to 633, wherein the anti-CD19 binding domain comprises CDR-H1, CDR-H2, and CDR-H3 having the amino acid sequences of SEQ ID NO:10, SEQ ID NO:11, and SEQ ID NO:12, and CDR-L1, CDR-L2, and CDR-L3 having the amino acid sequences of SEQ ID NO:23, SEQ ID NO:24, and SEQ ID NO:25
[1678] 682. The combination of any one of embodiments 678 to 681, wherein the anti-CD19 binding domain comprises a VH having the amino acid sequence of SEQ ID NO:13 and/or a VL having the amino acid sequence of SEQ ID NO:26.
[1679] 683. The combination of any one of embodiments 628 to 633, wherein the anti-CD19 binding domain comprises CDR-H1, CDR-H2, and CDR-H3 having the amino acid sequences of SEQ ID NO:27, SEQ ID NO:28, and SEQ ID NO:29, and CDR-L1, CDR-L2, and CDR-L3 having the amino acid sequences of SEQ ID NO:40, SEQ ID NO:41, and SEQ ID NO:42.
[1680] 684. The combination of any one of embodiments 628 to 633, wherein the anti-CD19 binding domain comprises CDR-H1, CDR-H2, and CDR-H3 having the amino acid sequences of SEQ ID NO:30, SEQ ID NO:31, and SEQ ID NO:32, and CDR-L1, CDR-L2, and CDR-L3 having the amino acid sequences of SEQ ID NO:43, SEQ ID NO:44, and SEQ ID NO:45.
[1681] 685. The combination of any one of embodiments 628 to 633, wherein the anti-CD19 binding domain comprises CDR-H1, CDR-H2, and CDR-H3 having the amino acid sequences of SEQ ID NO:33, SEQ ID NO:34, and SEQ ID NO:35, and CDR-L1, CDR-L2, and CDR-L3 having the amino acid sequences of SEQ ID NO:46, SEQ ID NO:47, and SEQ ID NO:48.
[1682] 686. The combination of any one of embodiments 628 to 633, wherein the anti-CD19 binding domain comprises CDR-H1, CDR-H2, and CDR-H3 having the amino acid sequences of SEQ ID NO:36, SEQ ID NO:37, and SEQ ID NO:38, and CDR-L1, CDR-L2, and CDR-L3 having the amino acid sequences of SEQ ID NO:49, SEQ ID NO:50, and SEQ ID NO:51.
[1683] 687. The combination of any one of embodiments 683 to 686, wherein the anti-CD19 binding domain comprises a VH having the amino acid sequence of SEQ ID NO: 39 and/or a VL having the amino acid sequence of SEQ ID NO: 52.
[1684] 688. The combination of any one of embodiments 627 to 687, wherein the CAR molecule comprises a transmembrane domain of a protein chosen from: the alpha, beta or zeta chain of the T-cell receptor, CD28, CD3 epsilon, CD45, CD4, CD5, CD8, CD9, CD16, CD22, CD33, CD37, CD64, CD80, CD86, CD134, CD137 and CD154.
[1685] 689. The combination of any one of embodiments 627 to 688, wherein the CAR molecule comprises a hinge region.
[1686] 690. The combination of any one of embodiments 627 to 689, wherein the CAR molecule comprises a costimulatory domain that is a functional signaling domain.
[1687] 691. The combination of embodiment 690, wherein the costimulatory domain has an amino acid sequence from OX40, CD2, CD27, CD28, CDS, ICAM-1, LFA-1 (CD11a/CD18), ICOS (CD278), or 4-1 BB (CD137).
[1688] 692. The combination of any one of embodiments 627 to 690, wherein the CAR molecule comprises an intracellular signaling domain comprising a functional signaling domain of 4-1BB and/or a functional signaling domain of CD3-zeta.
[1689] 693. The combination of any one of embodiments 627 to 692, wherein the CAR molecule comprises a leader sequence.
[1690] 694. The combination of any one of embodiments 627 to 632, wherein the CAR molecule comprises the amino acid sequence of 1928z (SEQ ID NO:201) with or without its signal (leader) sequence.
[1691] 695. The combination of any one of embodiments 627 to 632, wherein the CAR molecule comprises the amino acid sequence of the scFv portion of 1928z (SEQ ID NO:201).
[1692] 696. The combination of any one of embodiments 627 to 632, wherein the CAR molecule comprises the amino acid sequences of the heavy and light chain CDRs of 1928z (SEQ ID NO:201).
[1693] 697. The combination of embodiment 627, wherein the CAR composition is tisagenlecleucel.
[1694] 698. The combination of embodiment 627, wherein the CAR composition is axicabtagene ciloleucel.
[1695] 699. The combination of embodiment 627, wherein the CAR composition is lisocabtagene maraleucel.
[1696] 700. The combination of embodiment 627, wherein the CAR composition is brexucabtagene autoleucel.
[1697] 701. The combination of any one of embodiments 1 to 700, wherein the B cell targeting agent is a B cell depleting agent.
[1698] 702. The combination of any one of embodiments 1 to 701, wherein the B cell targeting agent is a BAFF receptor (BAFFR) binding molecule.
[1699] 703. The combination of embodiment 702, wherein the BAFFR binding molecule is an antibody or antigen-binding domain thereof.
[1700] 704. The combination of embodiment 702 or 703, wherein the BAFFR binding molecule comprises CDR-H1, CDR-H2, CDR-H3 having the amino acid sequences of ianalumab set forth in Table 18, and CDR-L1, CDR-L2, and CDR-L3 having the amino acid sequences of ianalumab set forth in Table 18.
[1701] 705. The combination of embodiment 704, wherein the BAFFR binding molecule comprises a heavy chain variable region (VH) and a light chain variable region (VL) having the VH and VL sequences of ianalumab set forth in Table 18.
[1702] 706. The combination of embodiment 705, wherein the BAFFR binding molecule is ianalumab.
[1703] 707. The combination of embodiment 702 or 703, wherein the BAFFR binding molecule comprises CDR-H1, CDR-H2, CDR-H3 having the amino acid sequences of BAFFR-1 set forth in Table 19, and CDR-L1, CDR-L2, and CDR-L3 having the amino acid sequences of BAFFR-1 set forth in Table 19.
[1704] 708. The combination of embodiment 702 or 703, wherein the BAFFR binding molecule comprises CDR-H1, CDR-H2, CDR-H3 having the amino acid sequences of BAFFR-2 set forth in Table 19, and CDR-L1, CDR-L2, and CDR-L3 having the amino acid sequences of BAFFR-2 set forth in Table 19.
[1705] 709. The combination of embodiment 702 or 703, wherein the BAFFR binding molecule comprises CDR-H1, CDR-H2, CDR-H3 having the amino acid sequences of BAFFR-3 set forth in Table 19, and CDR-L1, CDR-L2, and CDR-L3 having the amino acid sequences of BAFFR-3 set forth in Table 19.
[1706] 710. The combination of embodiment 702 or 703, wherein the BAFFR binding molecule comprises CDR-H1, CDR-H2, CDR-H3 having the amino acid sequences of BAFFR-4 set forth in Table 19, and CDR-L1, CDR-L2, and CDR-L3 having the amino acid sequences of BAFFR-4 set forth in Table 19.
[1707] 711. The combination of embodiment 702 or 703, wherein the BAFFR binding molecule comprises CDR-H1, CDR-H2, CDR-H3 having the amino acid sequences of BAFFR-5 set forth in Table 19, and CDR-L1, CDR-L2, and CDR-L3 having the amino acid sequences of BAFFR-5 set forth in Table 19.
[1708] 712. The combination of embodiment 702 or 703, wherein the BAFFR binding molecule comprises CDR-H1, CDR-H2, CDR-H3 having the amino acid sequences of BAFFR-5 set forth in Table 19, and CDR-L1, CDR-L2, and CDR-L3 having the amino acid sequences of BAFFR-5 set forth in Table 19.
[1709] 713. The combination of embodiment 702 or 703, wherein the BAFFR binding molecule comprises CDR-H1, CDR-H2, CDR-H3 having the amino acid sequences of BAFFR-5 set forth in Table 19, and CDR-L1, CDR-L2, and CDR-L3 having the amino acid sequences of BAFFR-5 set forth in Table 19.
[1710] 714. The combination of embodiment 702 or 703, wherein the BAFFR binding molecule comprises a heavy chain variable region (VH) and a light chain variable region (VL) having the VH and VL sequences of BAFFR-1 set forth in Table 19.
[1711] 715. The combination of embodiment 702 or 703, wherein the BAFFR binding molecule comprises a heavy chain variable region (VH) and a light chain variable region (VL) having the VH and VL sequences of BAFFR-2 set forth in Table 19.
[1712] 716. The combination of embodiment 702 or 703, wherein the BAFFR binding molecule comprises a heavy chain variable region (VH) and a light chain variable region (VL) having the VH and VL sequences of BAFFR-3 set forth in Table 19.
[1713] 717. The combination of embodiment 702 or 703, wherein the BAFFR binding molecule comprises a heavy chain variable region (VH) and a light chain variable region (VL) having the VH and VL sequences of BAFFR-4 set forth in Table 19.
[1714] 718. The combination of embodiment 702 or 703, wherein the BAFFR binding molecule comprises a heavy chain variable region (VH) and a light chain variable region (VL) having the VH and VL sequences of BAFFR-5 set forth in Table 19.
[1715] 719. The combination of embodiment 702 or 703, wherein the BAFFR binding molecule comprises a heavy chain variable region (VH) and a light chain variable region (VL) having the VH and VL sequences of BAFFR-6 set forth in Table 19.
[1716] 720. The combination of embodiment 702 or 703, wherein the BAFFR binding molecule comprises a heavy chain variable region (VH) and a light chain variable region (VL) having the VH and VL sequences of BAFFR-7 set forth in Table 19.
[1717] 721. The combination of any one of embodiments 1 to 701, wherein the B cell targeting agent is a CD20 binding molecule.
[1718] 722. The combination of embodiment 721, wherein the CD20 binding molecule is an antibody or antigen-binding domain thereof.
[1719] 723. The combination of embodiment 721 or embodiment 722, wherein the CD20 binding molecule is rituximab, ofatumumab, ocrelizumab, veltuzumab, or obinutuzumab.
[1720] 724. The combination of embodiment 723, wherein the CD20 binding molecule is rituximab.
[1721] 725. The combination of embodiment 723, wherein the CD20 binding molecule is ofatumumab.
[1722] 726. The combination of embodiment 723, wherein the CD20 binding molecule is ocrelizumab.
[1723] 727. The combination of embodiment 723, wherein the CD20 binding molecule is veltuzumab.
[1724] 728. The combination of embodiment 723, wherein the CD20 binding molecule is obinutuzumab.
[1725] 729. The combination of any one of embodiments 1 to 701, wherein the B cell targeting agent is a CD22 binding molecule.
[1726] 730. The combination of embodiment 729, wherein the CD22 binding molecule is an antibody or antigen-binding domain thereof.
[1727] 731. The combination of embodiment 729, wherein the CD22 binding molecule is epratuzumab.
[1728] 732. The combination of embodiment 729, wherein the CD22 binding molecule is inotuzumab.
[1729] 733. The combination of embodiment 729, wherein the CD22 binding molecule is inotuzumab ozogamicin.
[1730] 734. The combination of any one of embodiments 1 to 701, wherein the B cell targeting agent is a BAFF binding molecule.
[1731] 735. The combination of embodiment 734, wherein the BAFF binding molecule is an antibody or antigen-binding domain thereof.
[1732] 736. The combination of embodiment 734, wherein the BAFF binding molecule is belimumab, tibulizumab, BR3-Fc, blisibimod or atacicept.
[1733] 737. The combination of embodiment 736, wherein the BAFF binding molecule is belimumab.
[1734] 738. The combination of embodiment 736, wherein the BAFF binding molecule is tibulizumab.
[1735] 739. The combination of embodiment 736, wherein the BAFF binding molecule is BR3-Fc.
[1736] 740. The combination of embodiment 736, wherein the BAFF binding molecule is blisibimod.
[1737] 741. The combination of embodiment 736, wherein the BAFF binding molecule is atacicept.
[1738] 742. The combination of any one of embodiments 1 to 741, further comprising one or more additional agents.
[1739] 743. The combination of embodiment 742, wherein the one or more additional agents comprises a corticosteroid.
[1740] 744. The combination of embodiment 743, wherein the corticosteroid is dexamethasone.
[1741] 745. The combination of embodiment 743, wherein the corticosteroid is prednisone.
[1742] 746. The combination of any one of embodiments 742 to 745, wherein the one or more additional agents comprise an immunomodulatory imide drug (IMiD).
[1743] 747. The combination of embodiment 746, wherein the immunomodulatory imide drug (IMiD) is lenalidomide, thalidomide, pomalidomide, or iberdomide.
[1744] 748. The combination of embodiment 747, wherein the immunomodulatory imide drug (IMiD) is lenalidomide.
[1745] 749. The combination of any one of embodiments 1 to 748, wherein the amount of the B cell targeting agent in the combination is effective, when administered to a subject, to reduce the likelihood of the subject developing CRS following administration of the anti-CD19 agent.
[1746] 750. The combination of any one of embodiments 1 to 748, wherein the amount of the B cell targeting agent in the combination is effective, when administered to a subject, to reduce the severity of one or more symptoms of CRS in the subject following administration of the anti-CD19 agent compared to the severity of the one or more symptoms in the absence of the B cell targeting agent.
[1747] 751. The combination of any one of embodiments 1 to 750, wherein the anti-CD19 agent and B cell targeting agent are separate molecules.
[1748] 752. The combination of any one of embodiments 1 to 751, wherein the anti-CD19 agent and B cell targeting agent are formulated in separate pharmaceutical compositions.
[1749] 753. The combination of embodiment 752, wherein the anti-CD19 agent and/or B cell targeting agent are formulated in unit dosage forms.
[1750] 754. The combination of any one of embodiments 1 to 753, for use in a method of treating a subject having a B cell malignancy.
[1751] 755. A method of treating a subject having a B cell malignancy, comprising administering the combination of any one of embodiments 1 to 753 to the subject.
[1752] 756. The combination for use according to embodiment 754 or the method of embodiment 755, wherein the method comprises administering the B cell targeting agent to the subject one or more times prior to administering the anti-CD19 agent to the subject for the first time.
[1753] 757. The combination for use or method of any one of embodiments 754 to 756, wherein the method comprises administering the B cell targeting agent to the subject a single time prior to administering the anti-CD19 agent to the subject for the first time.
[1754] 758. The combination for use or method of any one of embodiments 754 to 756, wherein the method comprises administering the B cell targeting agent to the subject more than one time prior to administering the anti-CD19 agent to the subject for the first time.
[1755] 759. The combination for use or method of any one of embodiments 754 to 758, wherein the B cell malignancy is a B cell malignancy that expresses cell surface CD19.
[1756] 760. The combination for use or method of any one of embodiments 754 to 759, wherein the B cell malignancy is a hematological cancer.
[1757] 761. The combination for use or method of any one of embodiments 754 to 759, wherein the B cell malignancy is a malignant lymphoproliferative condition
[1758] 762. The combination for use or method of any one of embodiments 754 to 759, wherein the B cell malignancy is a plasma cell dyscrasia.
[1759] 763. The combination for use or method of any one of embodiments 754 to 759, wherein the B cell malignancy is an acute leukemia.
[1760] 764. The combination for use or method of any one of embodiments 754 to 759, wherein the B cell malignancy is B cell acute lymphocytic leukemia (B-ALL).
[1761] 765. The combination for use or method of any one of embodiments 754 to 759, wherein the B cell malignancy is relapsed and/or refractory B cell acute lymphocytic leukemia (B-ALL).
[1762] 766. The combination for use or method of any one of embodiments 754 to 759, wherein the B cell malignancy is a non-Hodgkin's lymphoma (NHL).
[1763] 767. The combination for use or method of any one of embodiments 754 to 759, wherein the B cell malignancy is a relapsed and/or refractory non-Hodgkin's lymphoma (NHL).
[1764] 768. The combination for use or method of any one of embodiments 754 to 759, wherein the B cell malignancy is chronic lymphocytic leukemia (CLL)/small lymphocytic lymphoma (SLL).
[1765] 769. The combination for use or method of any one of embodiments 754 to 759, wherein the B cell malignancy is relapsed and/or refractory chronic lymphocytic leukemia (CLL)/small lymphocytic lymphoma (SLL).
[1766] 770. The combination for use or method of any one of embodiments 754 to 759, wherein the B cell malignancy is follicular lymphoma (FL), optionally wherein the FL is small cell FL or large cell FL.
[1767] 771. The combination for use or method of any one of embodiments 754 to 759, wherein the B cell malignancy is relapsed and/or refractory follicular lymphoma (FL), optionally wherein the FL is small cell FL or large cell FL.
[1768] 772. The combination for use or method of any one of embodiments 754 to 759, wherein the B cell malignancy is mantle cell lymphoma (MCL).
[1769] 773. The combination for use or method of any one of embodiments 754 to 759, wherein the B cell malignancy is relapsed and/or refractory mantle cell lymphoma (MCL).
[1770] 774. The combination for use or method of any one of embodiments 754 to 759, wherein the B cell malignancy is diffuse large B-cell lymphoma (DLBCL).
[1771] 775. The combination for use or method of any one of embodiments 754 to 759, wherein the B cell malignancy is relapsed and/or refractory diffuse large B-cell lymphoma (DLBCL).
[1772] 776. The combination for use or method of any one of embodiments 754 to 759, wherein the B cell malignancy is Burkitt lymphoma.
[1773] 777. The combination for use or method of any one of embodiments 754 to 759, wherein the B cell malignancy is lymphoplasmacytic lymphoma (Waldenstrom macroglobulinemia).
[1774] 778. The combination for use or method of any one of embodiments 754 to 759, wherein the B cell malignancy is MALT lymphoma (mucosa-associated lymphoid tissue lymphoma).
[1775] 779. The combination for use or method of any one of embodiments 754 to 759, wherein the B cell malignancy is marginal zone lymphoma (MZL).
[1776] 780. The combination for use or method of any one of embodiments 754 to 759, wherein the B cell malignancy is extranodal marginal zone lymphoma (EMZL).
[1777] 781. The combination for use or method of any one of embodiments 754 to 759, wherein the B cell malignancy is nodal marginal zone B-cell lymphoma (NZML).
[1778] 782. The combination for use or method of any one of embodiments 754 to 759, wherein the B cell malignancy is splenic marginal zone B-cell lymphoma (SMZL).
[1779] 783. The combination for use or method of any one of embodiments 766 to 782, wherein the subject has failed at least one prior line of standard of care therapy.
[1780] 784. The combination for use or method of embodiment 783, wherein the subject has failed up to five prior lines of standard of care therapies.
[1781] 785. The combination for use or method of embodiment 783 or embodiment 784, wherein the subject has failed one prior line of standard of care therapy.
[1782] 786. The combination for use or method of embodiment 783 or embodiment 784, wherein the subject has failed two prior lines of standard of care therapy.
[1783] 787. The combination for use or method of embodiment 783 or embodiment 784, wherein the subject has failed three prior lines of standard of care therapy.
[1784] 788. The combination for use or method of embodiment 783 or embodiment 784, wherein the subject has failed four prior lines of standard of care therapy.
[1785] 789. The combination for use or method of embodiment 783 or embodiment 784, wherein the subject has failed five prior lines of standard of care therapy.
[1786] 790. The combination for use or method of any one of embodiments 783 to 789, wherein the at least one prior line of standard of care therapies comprise an anti-CD20 therapy.
[1787] 791. The combination for use or method of embodiment 790, wherein the anti-CD20 therapy is rituximab.
[1788] 792. The combination for use or method of any one of embodiments 783 to 791, wherein the subject is intolerant to or ineligible for one or more other approved therapies.
[1789] 793. The combination for use or method of embodiment 792, wherein the one or more other approved therapies comprise an autologous stem cell transplant (ASCT).
[1790] 794. The combination for use or method of any one of embodiments 783 to 793, wherein the subject is a non-responder to a CAR composition.
[1791] 795. The combination for use or method of embodiment 794, wherein the CAR composition is an anti-CD19 CAR composition.
[1792] 796. The combination for use or method of embodiment 794 or embodiment 795, wherein the CAR composition comprises CTL019, tisagenlecleucel, axicabtagene ciloleucel, brexucabtagene autoleucel or lisocabtagene maraleucel.
[1793] 797. The combination for use or method of any one of embodiments 794 to 796, wherein the anti-CD19 agent does not comprise a chimeric antigen receptor and/or is not a CAR composition.
[1794] 798. The combination for use or method of any one of embodiments 754 to 759, wherein the B cell malignancy is a Hodgkin's lymphoma.
[1795] 799. The combination for use or method of any one of embodiments 754 to 759, wherein the B cell malignancy is multiple myeloma.
[1796] 800. The combination for use or method of any one of embodiments 754 to 759, wherein the B cell malignancy is hairy cell leukemia.
[1797] 801. The combination for use or method of any one of embodiments 754 to 759, wherein the B cell malignancy is primary effusion lymphoma.
[1798] 802. The combination for use or method of any one of embodiments 754 to 759, wherein the B cell malignancy is B cell prolymphocytic leukemia.
[1799] 803. The combination for use or method of any one of embodiments 754 to 759, wherein the B cell malignancy is is plasmablastic lymphoma.
[1800] 804. The combination for use or method of any one of embodiments 754 to 759, wherein the B cell malignancy is follicle center lymphoma.
[1801] 805. The combination for use or method of any one of embodiments 754 to 759, wherein the B cell malignancy is precursor B-lymphoblastic leukemia.
[1802] 806. The combination for use or method of any one of embodiments 754 to 759, wherein the B cell malignancy is high-grade B-cell lymphoma.
[1803] 807. The combination for use or method of any one of embodiments 754 to 759, wherein the B cell malignancy is primary mediastinal large B-cell lymphoma.
[1804] 808. An anti-CD19 agent for use as a medicine in combination with a B cell targeting agent.
[1805] 809. An anti-CD19 agent for use in the treatment of a B cell malignancy in combination with a B cell targeting agent.
[1806] 810. The anti-CD19 agent for use according to embodiment 808 or embodiment 809, wherein the anti-CD19 agent is a CD19 agent described in any one of embodiments 2 to 700.
[1807] 811. The anti-CD19 agent for use according to any one of embodiments 808 to 810, wherein the B cell targeting agent is a B cell targeting agent described in any one of embodiments 701 to 741.
[1808] 812. The anti-CD19 agent for use according to any one of embodiments 809 to 811, wherein the B cell malignancy is a B cell malignancy described in any one of embodiments 759 to 807.
[1809] 813. A B cell targeting agent for use as a medicine in combination with an anti-CD19 agent.
[1810] 814. A B cell targeting agent for use in the treatment of a B cell malignancy in combination with an anti-CD19 agent.
[1811] 815. The B cell targeting agent for use according to embodiment 813 or embodiment 814, wherein the anti-CD19 agent is a CD19 agent described in any one of embodiments 2 to 700.
[1812] 816. The B cell targeting agent for use according to any one of embodiments 813 to 815, wherein the B cell targeting agent is a B cell targeting agent described in any one of embodiments 701 to 741.
[1813] 817. The B cell targeting agent for use according to any one of embodiments 814 to 816, wherein the B cell malignancy is a B cell malignancy described in any one of embodiments 759 to 807.
[1814] 818. Use of an anti-CD19 agent in the manufacture of a medicament for treating a B cell malignancy, wherein the medicament is for administration in combination with a B cell targeting agent.
[1815] 819. The use of embodiment 818, wherein the anti-CD19 agent is a CD19 agent described in any one of embodiments 2 to 700.
[1816] 820. The use according to any one of embodiments 818 to 819, wherein the B cell targeting agent is a B cell targeting agent described in any one of embodiments 701 to 741.
[1817] 821. The use according to any one of embodiments 809 to 811, wherein the B cell malignancy is a B cell malignancy described in any one of embodiments 759 to 807.
[1818] 822. Use of a B cell targeting agent in the manufacture of a medicament for treating a B cell malignancy, wherein the medicament is for administration in combination with an anti-CD19 agent.
[1819] 823. The use according to embodiment 822, wherein the anti-CD19 agent is a CD19 agent described in any one of embodiments 2 to 700.
[1820] 824. The use according to any one of embodiments 822 to 823, wherein the B cell targeting agent is a B cell targeting agent described in any one of embodiments 701 to 741.
[1821] 825. The use according to any one of embodiments 822 to 824, wherein the B cell malignancy is a B cell malignancy described in any one of embodiments 759 to 807.
[1822] 826. A chimeric antigen receptor (“CAR”) molecule that binds CD19, comprising an anti-CD19 binding domain, a transmembrane domain, and an intracellular signaling domain, wherein the anti-CD19 binding domain comprises CDR-H1, CDR-H2, and CDR-H3 having the amino acid sequences of SEQ ID NO:1, SEQ ID NO:2, and SEQ ID NO:3, and CDR-L1, CDR-L2, and CDR-L3 having the amino acid sequences of SEQ ID NO:14, SEQ ID NO:15, and SEQ ID NO:16.
[1823] 827. A chimeric antigen receptor (“CAR”) molecule that binds CD19, comprising an anti-CD19 binding domain, a transmembrane domain, and an intracellular signaling domain, wherein the anti-CD19 binding domain comprises CDR-H1, CDR-H2, and CDR-H3 having the amino acid sequences of SEQ ID NO:4, SEQ ID NO:5, and SEQ ID NO:6, and CDR-L1, CDR-L2, and CDR-L3 having the amino acid sequences of SEQ ID NO:17, SEQ ID NO:18, and SEQ ID NO:19.
[1824] 828. A chimeric antigen receptor (“CAR”) molecule that binds CD19, comprising an anti-CD19 binding domain, a transmembrane domain, and an intracellular signaling domain, wherein the anti-CD19 binding domain comprises CDR-H1, CDR-H2, and CDR-H3 having the amino acid sequences of SEQ ID NO:7, SEQ ID NO:8, and SEQ ID NO:9, and CDR-L1, CDR-L2, and CDR-L3 having the amino acid sequences of SEQ ID NO:20, SEQ ID NO:21, and SEQ ID NO:22.
[1825] 829. A chimeric antigen receptor (“CAR”) molecule that binds CD19, comprising an anti-CD19 binding domain, a transmembrane domain, and an intracellular signaling domain, wherein the anti-CD19 binding domain comprises CDR-H1, CDR-H2, and CDR-H3 having the amino acid sequences of SEQ ID NO:10, SEQ ID NO:11, and SEQ ID NO:12, and CDR-11, CDR-L2, and CDR-L3 having the amino acid sequences of SEQ ID NO:23, SEQ ID NO:24, and SEQ ID NO:25.
[1826] 830. The CAR molecule of any one of embodiments 826 to 829, wherein the anti-CD19 binding domain comprises a VH having the amino acid sequence of SEQ ID NO:13 and/or a VL having the amino acid sequence of SEQ ID NO:26.
[1827] 831. A chimeric antigen receptor (“CAR”) molecule that binds CD19, comprising an anti-CD19 binding domain, a transmembrane domain, and an intracellular signaling domain, wherein the anti-CD19 binding domain comprises CDR-H1, CDR-H2, and CDR-H3 having the amino acid sequences of SEQ ID NO:27, SEQ ID NO:28, and SEQ ID NO:29, and CDR-11, CDR-L2, and CDR-L3 having the amino acid sequences of SEQ ID NO:40, SEQ ID NO:41, and SEQ ID NO:42.
[1828] 832. A chimeric antigen receptor (“CAR”) molecule that binds CD19, comprising an anti-CD19 binding domain, a transmembrane domain, and an intracellular signaling domain, wherein the anti-CD19 binding domain comprises CDR-H1, CDR-H2, and CDR-H3 having the amino acid sequences of SEQ ID NO:30, SEQ ID NO:31, and SEQ ID NO:32, and CDR-11, CDR-L2, and CDR-L3 having the amino acid sequences of SEQ ID NO:43, SEQ ID NO:44, and SEQ ID NO:45.
[1829] 833. A chimeric antigen receptor (“CAR”) molecule that binds CD19, comprising an anti-CD19 binding domain, a transmembrane domain, and an intracellular signaling domain, wherein the anti-CD19 binding domain comprises CDR-H1, CDR-H2, and CDR-H3 having the amino acid sequences of SEQ ID NO:33, SEQ ID NO:34, and SEQ ID NO:35, and CDR-11, CDR-L2, and CDR-L3 having the amino acid sequences of SEQ ID NO:46, SEQ ID NO:47, and SEQ ID NO:48.
[1830] 834. A chimeric antigen receptor (“CAR”) molecule that binds CD19, comprising an anti-CD19 binding domain, a transmembrane domain, and an intracellular signaling domain, wherein the anti-CD19 binding domain comprises CDR-H1, CDR-H2, and CDR-H3 having the amino acid sequences of SEQ ID NO:36, SEQ ID NO:37, and SEQ ID NO:38, and CDR-11, CDR-L2, and CDR-L3 having the amino acid sequences of SEQ ID NO:49, SEQ ID NO:50, and SEQ ID NO:51.
[1831] 835. The CAR molecule of any one of embodiments 831 to 834, wherein the anti-CD19 binding domain comprises a VH having the amino acid sequence of SEQ ID NO: 39 and/or a VL having the amino acid sequence of SEQ ID NO: 52.
[1832] 836. The CAR molecule of any one of embodiments 826 to 835, wherein the intracellular signaling domain comprises a costimulatory domain and a primary signaling domain.
[1833] 837. The CAR of any one of embodiments 826 to 836, wherein the CAR molecule comprises an scFv.
[1834] 838. The CAR molecule of embodiment 837, wherein the anti-CD19 binding domain is a scFv comprising a heavy chain variable region (VH) attached to a heavy chain light region (VL) via a linker.
[1835] 839. The CAR molecule of any one of embodiments 826 to 838, wherein the CAR molecule comprises a transmembrane domain of a protein chosen from: the alpha, beta or zeta chain of the T-cell receptor, CD28, CD3 epsilon, CD45, CD4, CD5, CD8, CD9, CD16, CD22, CD33, CD37, CD64, CD80, CD86, CD134, CD137 and CD154.
[1836] 840. The CAR molecule of any one of embodiments 826 to 839, wherein the CAR molecule comprises a hinge region.
[1837] 841. The CAR molecule of any one of embodiments 826 to 840, wherein the CAR molecule comprises a costimulatory domain that is a functional signaling domain.
[1838] 842. The CAR molecule of embodiment 841, wherein the costimulatory domain has an amino acid sequence from OX40, CD2, CD27, CD28, CDS, ICAM-1, LFA-1 (CD11a/CD18), ICOS (CD278), or 4-11BE (CD137).
[1839] 843. The CAR molecule of any one of embodiments 826 to 842, wherein the CAR molecule comprises an intracellular signaling domain comprising a functional signaling domain of 4-1BE and/or a functional signaling domain of CD3-zeta.
[1840] 844. The CAR molecule of any one of embodiments 826 to 843, wherein the CAR molecule comprises a leader sequence.

### 10. INCORPORATION BY REFERENCE

[1841] All publications, patents, patent applications and other documents cited in this application are hereby incorporated by reference in their entireties for all purposes to the same extent as if each individual publication, patent, patent application or other document were individually indicated to be incorporated by reference for all purposes. In the event that there are any inconsistencies between the teachings of one or more of the references incorporated herein and the present disclosure, the teachings of the present specification are intended.

The application's sequence listing, which the Patent Office published only in electronic form, follows.

SEQUENCE LISTING (1338 sequences)

SEQ ID NO: 1 - protein, 10 aa, Artificial Sequence
  source: /note="Description of Artificial Sequence: Synthetic peptide"
GYTFTTYWIQ

SEQ ID NO: 2 - protein, 17 aa, Artificial Sequence
  source: /note="Description of Artificial Sequence: Synthetic peptide"
AVYPGDADTRYTQKFQG

SEQ ID NO: 3 - protein, 11 aa, Artificial Sequence
  source: /note="Description of Artificial Sequence: Synthetic peptide"
DAGLEYYALDY

SEQ ID NO: 4 - protein, 5 aa, Artificial Sequence
  source: /note="Description of Artificial Sequence: Synthetic peptide"
TYWIQ

SEQ ID NO: 5 - protein, 17 aa, Artificial Sequence
  source: /note="Description of Artificial Sequence: Synthetic peptide"
AVYPGDADTRYTQKFQG

SEQ ID NO: 6 - protein, 11 aa, Artificial Sequence
  source: /note="Description of Artificial Sequence: Synthetic peptide"
DAGLEYYALDY

SEQ ID NO: 7 - protein, 7 aa, Artificial Sequence
  source: /note="Description of Artificial Sequence: Synthetic peptide"
GYTFTTY

SEQ ID NO: 8 - protein, 6 aa, Artificial Sequence
  source: /note="Description of Artificial Sequence: Synthetic peptide"
YPGDAD

SEQ ID NO: 9 - protein, 11 aa, Artificial Sequence
  source: /note="Description of Artificial Sequence: Synthetic peptide"
DAGLEYYALDY

SEQ ID NO: 10 - protein, 8 aa, Artificial Sequence
  source: /note="Description of Artificial Sequence: Synthetic peptide"
GYTFTTYW

SEQ ID NO: 11 - protein, 8 aa, Artificial Sequence
  source: /note="Description of Artificial Sequence: Synthetic peptide"
VYPGDADT

SEQ ID NO: 12 - protein, 13 aa, Artificial Sequence
  source: /note="Description of Artificial Sequence: Synthetic peptide"
GRDAGLEYYALDY

SEQ ID NO: 13 - protein, 120 aa, Artificial Sequence
  source: /note="Description of Artificial Sequence: Synthetic polypeptide"
QVQLVQSGAEVKKPGASVKVSCKASGYTFTTYWIQWVRQAPGQRLEWMGAVYPGDADTRYTQKFQGRVTLTADRSASTAYMELSSLRSEDTAVYYCGRDAGLEYYALDYWGQGTLVTVSS

SEQ ID NO: 14 - protein, 11 aa, Artificial Sequence
  source: /note="Description of Artificial Sequence: Synthetic peptide"
RASQDVGTAVA

SEQ ID NO: 15 - protein, 7 aa, Artificial Sequence
  source: /note="Description of Artificial Sequence: Synthetic peptide"
WASTRHT

SEQ ID NO: 16 - protein, 10 aa, Artificial Sequence
  source: /note="Description of Artificial Sequence: Synthetic peptide"
QQYANFPLYT

SEQ ID NO: 17 - protein, 11 aa, Artificial Sequence
  source: /note="Description of Artificial Sequence: Synthetic peptide"
RASQDVGTAVA

SEQ ID NO: 18 - protein, 7 aa, Artificial Sequence
  source: /note="Description of Artificial Sequence: Synthetic peptide"
WASTRHT

SEQ ID NO: 19 - protein, 10 aa, Artificial Sequence
  source: /note="Description of Artificial Sequence: Synthetic peptide"
QQYANFPLYT

SEQ ID NO: 20 - protein, 7 aa, Artificial Sequence
  source: /note="Description of Artificial Sequence: Synthetic peptide"
SQDVGTA

SEQ ID NO: 21 - protein, 3 aa, Artificial Sequence
  source: /note="Description of Artificial Sequence: Synthetic peptide"
WAS

SEQ ID NO: 22 - protein, 7 aa, Artificial Sequence
  source: /note="Description of Artificial Sequence: Synthetic peptide"
YANFPLY

SEQ ID NO: 23 - protein, 6 aa, Artificial Sequence
  source: /note="Description of Artificial Sequence: Synthetic peptide"
QDVGTA

SEQ ID NO: 24 - protein, 3 aa, Artificial Sequence
  source: /note="Description of Artificial Sequence: Synthetic peptide"
WAS

SEQ ID NO: 25 - protein, 10 aa, Artificial Sequence
  source: /note="Description of Artificial Sequence: Synthetic peptide"
QQYANFPLYT

SEQ ID NO: 26 - protein, 108 aa, Artificial Sequence
  source: /note="Description of Artificial Sequence: Synthetic polypeptide"
EIVMTQSPATLSVSPGERATLSCRASQDVGTAVAWYQQKPGQAPRLLIYWASTRHTGIPARFSGSGSGTEFTLTISSLQSEDFAVYFCQQYANFPLYTFGQGTKLEIK

SEQ ID NO: 27 - protein, 10 aa, Artificial Sequence
  source: /note="Description of Artificial Sequence: Synthetic peptide"
GYSFTNYWMN

SEQ ID NO: 28 - protein, 17 aa, Artificial Sequence
  source: /note="Description of Artificial Sequence: Synthetic peptide"
MIHPSDSEIRLNQKFQG

SEQ ID NO: 29 - protein, 10 aa, Artificial Sequence
  source: /note="Description of Artificial Sequence: Synthetic peptide"
WYYLSSPMDY

SEQ ID NO: 30 - protein, 5 aa, Artificial Sequence
  source: /note="Description of Artificial Sequence: Synthetic peptide"
NYWMN

SEQ ID NO: 31 - protein, 17 aa, Artificial Sequence
  source: /note="Description of Artificial Sequence: Synthetic peptide"
MIHPSDSEIRLNQKFQG

SEQ ID NO: 32 - protein, 10 aa, Artificial Sequence
  source: /note="Description of Artificial Sequence: Synthetic peptide"
WYYLSSPMDY

SEQ ID NO: 33 - protein, 7 aa, Artificial Sequence
  source: /note="Description of Artificial Sequence: Synthetic peptide"
GYSFTNY

SEQ ID NO: 34 - protein, 6 aa, Artificial Sequence
  source: /note="Description of Artificial Sequence: Synthetic peptide"
HPSDSE

SEQ ID NO: 35 - protein, 10 aa, Artificial Sequence
  source: /note="Description of Artificial Sequence: Synthetic peptide"
WYYLSSPMDY

SEQ ID NO: 36 - protein, 8 aa, Artificial Sequence
  source: /note="Description of Artificial Sequence: Synthetic peptide"
GYSFTNYW

SEQ ID NO: 37 - protein, 8 aa, Artificial Sequence
  source: /note="Description of Artificial Sequence: Synthetic peptide"
IHPSDSEI

SEQ ID NO: 38 - protein, 12 aa, Artificial Sequence
  source: /note="Description of Artificial Sequence: Synthetic peptide"
SRWYYLSSPMDY

SEQ ID NO: 39 - protein, 119 aa, Artificial Sequence
  source: /note="Description of Artificial Sequence: Synthetic polypeptide"
EVQLVQSGAEVKKPGESLKISCKASGYSFTNYWMNWVRQMPGKGLEWMGMIHPSDSEIRLNQKFQGQVTLSVDKSIGTAYMQWSSLKASDTAMYYCSRWYYLSSPMDYWGQGTTVTVSS

SEQ ID NO: 40 - protein, 11 aa, Artificial Sequence
  source: /note="Description of Artificial Sequence: Synthetic peptide"
RASQDVGTAVA

SEQ ID NO: 41 - protein, 7 aa, Artificial Sequence
  source: /note="Description of Artificial Sequence: Synthetic peptide"
WASTRHT

SEQ ID NO: 42 - protein, 9 aa, Artificial Sequence
  source: /note="Description of Artificial Sequence: Synthetic peptide"
QQYSSYPYT

SEQ ID NO: 43 - protein, 11 aa, Artificial Sequence
  source: /note="Description of Artificial Sequence: Synthetic peptide"
RASQDVGTAVA

SEQ ID NO: 44 - protein, 7 aa, Artificial Sequence
  source: /note="Description of Artificial Sequence: Synthetic peptide"
WASTRHT

SEQ ID NO: 45 - protein, 9 aa, Artificial Sequence
  source: /note="Description of Artificial Sequence: Synthetic peptide"
QQYSSYPYT

SEQ ID NO: 46 - protein, 7 aa, Artificial Sequence
  source: /note="Description of Artificial Sequence: Synthetic peptide"
SQDVGTA

SEQ ID NO: 47 - protein, 3 aa, Artificial Sequence
  source: /note="Description of Artificial Sequence: Synthetic peptide"
WAS

SEQ ID NO: 48 - protein, 6 aa, Artificial Sequence
  source: /note="Description of Artificial Sequence: Synthetic peptide"
YSSYPY

SEQ ID NO: 49 - protein, 6 aa, Artificial Sequence
  source: /note="Description of Artificial Sequence: Synthetic peptide"
QDVGTA

SEQ ID NO: 50 - protein, 3 aa, Artificial Sequence
  source: /note="Description of Artificial Sequence: Synthetic peptide"
WAS

SEQ ID NO: 51 - protein, 9 aa, Artificial Sequence
  source: /note="Description of Artificial Sequence: Synthetic peptide"
QQYSSYPYT

SEQ ID NO: 52 - protein, 107 aa, Artificial Sequence
  source: /note="Description of Artificial Sequence: Synthetic polypeptide"
EIVMTQSPATLSVSPGERATLSCRASQDVGTAVAWYQQKPGQAPRLLIYWASTRHTGIPARFSGSGSGTEFTLTISSLQSEDFAVYFCQQYSSYPYTFGQGTKLEIK

SEQ ID NO: 53 - protein, 12 aa, Artificial Sequence
  source: /note="Description of Artificial Sequence: Synthetic peptide"
GDSVSSNSAAWG

SEQ ID NO: 54 - protein, 18 aa, Artificial Sequence
  source: /note="Description of Artificial Sequence: Synthetic peptide"
RIYYRSKWYNSYAVSVKS

SEQ ID NO: 55 - protein, 12 aa, Artificial Sequence
  source: /note="Description of Artificial Sequence: Synthetic peptide"
YDWVPKIGVFDS

SEQ ID NO: 56 - protein, 12 aa, Artificial Sequence
  source: /note="Description of Artificial Sequence: Synthetic peptide"
RASQFISSSYLS

SEQ ID NO: 57 - protein, 7 aa, Artificial Sequence
  source: /note="Description of Artificial Sequence: Synthetic peptide"
GSSSRAT

SEQ ID NO: 58 - protein, 9 aa, Artificial Sequence
  source: /note="Description of Artificial Sequence: Synthetic peptide"
QQLYSSPMT

SEQ ID NO: 59 - protein, 124 aa, Artificial Sequence
  source: /note="Description of Artificial Sequence: Synthetic polypeptide"
QVQLQQSGPGLVKPSQTLSLTCAISGDSVSSNSAAWGWIRQSPGRGLEWLGRIYYRSKWYNSYAVSVKSRITINPDTSKNQFSLQLNSVTPEDTAVYYCARYDWVPKIGVFDSWGQGTLVTVSS

SEQ ID NO: 60 - protein, 108 aa, Artificial Sequence
  source: /note="Description of Artificial Sequence: Synthetic polypeptide"
DIVLTQSPATLSLSPGERATLSCRASQFISSSYLSWYQQKPGQAPRLLIYGSSSRATGVPARFSGSGSGTDFTLTISSLEPEDFAVYYCQQLYSSPMTFGQGTKVEIK

SEQ ID NO: 61 - protein, 454 aa, Artificial Sequence
  source: /note="Description of Artificial Sequence: Synthetic polypeptide"
QVQLQQSGPGLVKPSQTLSLTCAISGDSVSSNSAAWGWIRQSPGRGLEWLGRIYYRSKWYNSYAVSVKSRITINPDTSKNQFSLQLNSVTPEDTAVYYCARYDWVPKIGVFDSWGQGTLVTVSSASTKGPSVFPLAPSSKSTSGGTAALGCLVKDYFPEPVTVSWNSGALTSGVHTFPAVLQSSGLYSLSSVVTVPSSSLGTQTYICNVNHKPSNTKVDKRVEPKSCDKTHTCPPCPAPELLGGPSVFLFPPKPKDTLMISRTPEVTCVVVDVSHEDPEVKFNWYVDGVEVHNAKTKPREEQYNSTYRVVSVLTVLHQDWLNGKEYKCKVSNKALPAPIEKTISKAKGQPREPQVYTLPPSREEMTKNQVSLTCLVKGFYPSDIAVEWESNGQPENNYKTTPPVLDSDGSFFLYSKLTVDKSRWQQGNVFSCSVMHEALHNHYTQKSLSLSPGK

SEQ ID NO: 62 - protein, 215 aa, Artificial Sequence
  source: /note="Description of Artificial Sequence: Synthetic polypeptide"
DIVLTQSPATLSLSPGERATLSCRASQFISSSYLSWYQQKPGQAPRLLIYGSSSRATGVPARFSGSGSGTDFTLTISSLEPEDFAVYYCQQLYSSPMTFGQGTKVEIKRTVAAPSVFIFPPSDEQLKSGTASVVCLLNNFYPREAKVQWKVDNALQSGNSQESVTEQDSKDSTYSLSSTLTLSKADYEKHKVYACEVTHQGLSSPVTKSFNRGEC

SEQ ID NO: 63 - protein, 492 aa, Artificial Sequence
  source: /note="Description of Artificial Sequence: Synthetic polypeptide"
QVQLVQSGAEVKKPGASVKVSCKASGYTFTTYWIQWVRQAPGQRLEWMGAVYPGDADTRYTQKFQGRVTLTADRSASTAYMELSSLRSEDTAVYYCGRDAGLEYYALDYWGQGTLVTVSSASTKGPSVFPLAPSSKSTSGGTAALGCLVKDYFPEPVTVSWNSGALTSGVHTFPAVLQSSGLYSLSSVVTVPSSSLGTQTYICNVNHKPSNTKVDKRVEPKSCGGGGSGGGGSEVQLVESGGGLVQPGGSLKLSCAASGFTFNTYAMNWVRQASGKGLEWVGRIRSKYNNYATYYADSVKDRFTISRDDSKSTLYLQMNSLKTEDTAVYYCVRHGNFGNSYVSWFAYWGQGTLVTVSSGGGGSGGGGSGGGGSGGGGSQAVVTQEPSLTVSPGGTVTLTCRSSTGAVTTSNYANWVQQKPGQAPRGLIGGTNKRAPWTPARFSGSLLGDKAALTLSGAQPEDEAEYFCALWYSNLWVFGGGTKLTVLGGGGS

SEQ ID NO: 64 - protein, 215 aa, Artificial Sequence
  source: /note="Description of Artificial Sequence: Synthetic polypeptide"
EIVMTQSPATLSVSPGERATLSCRASQDVGTAVAWYQQKPGQAPRLLIYWASTRHTGIPARFSGSGSGTEFTLTISSLQSEDFAVYFCQQYANFPLYTFGQGTKLEIKRTVAAPSVFIFPPSDEQLKSGTASVVCLLNNFYPREAKVQWKVDNALQSGNSQESVTEQDSKDSTYSLSSTLTLSKADYEKHKVYACEVTHQGLSSPVTKSFNRGEC

SEQ ID NO: 65 - protein, 99 aa, Artificial Sequence
  source: /note="Description of Artificial Sequence: Synthetic polypeptide"
SQQIYGVVYGNVTFHVPSNVPLKEVLWKKQKDKVAELENSEFRAFSSFKNRVYLDTVSGSLTIYNLTSSDEDEYEMESPNITDTMKFFLYVLESGGGGS

SEQ ID NO: 66 - protein, 492 aa, Artificial Sequence
  source: /note="Description of Artificial Sequence: Synthetic polypeptide"
QVQLVQSGAEVKKPGASVKVSCKASGYTFTTYWIQWVRQAPGQRLEWMGAVYPGDADTRYTQKFQGRVTLTADRSASTAYMELSSLRSEDTAVYYCGRDAGLEYYALDYWGQGTLVTVSSASTKGPSVFPLAPSSKSTSGGTAALGCLVKDYFPEPVTVSWNSGALTSGVHTFPAVLQSSGLYSLSSVVTVPSSSLGTQTYICNVNHKPSNTKVDKRVEPKSCGGGGSGGGGSEVQLVESGGGLVQPGGSLKLSCAASGFTFNTYAMNWVRQASGKGLEWVGRIRSKYNNYATYYADSVKDRFTISRDDSKNTAYLQMNSLKTEDTAVYYCVRHGNFGNSYVSWFAHWGQGTLVTVSSGGGGSGGGGSGGGGSGGGGSQAVVTQEPSLTVSPGGTVTLTCGSSTGAVTSSNYANWVQQKPGQAPRGLIGGTNKRAPWTPARFSGSLLGGKAALTLSGAQPEDEAEYYCALWYSNLWVFGGGTKLTVLGGGGS

SEQ ID NO: 67 - protein, 492 aa, Artificial Sequence
  source: /note="Description of Artificial Sequence: Synthetic polypeptide"
QVQLVQSGAEVKKPGASVKVSCKASGYTFTTYWIQWVRQAPGQRLEWMGAVYPGDADTRYTQKFQGRVTLTADRSASTAYMELSSLRSEDTAVYYCGRDAGLEYYALDYWGQGTLVTVSSASTKGPSVFPLAPSSKSTSGGTAALGCLVKDYFPEPVTVSWNSGALTSGVHTFPAVLQSSGLYSLSSVVTVPSSSLGTQTYICNVNHKPSNTKVDKRVEPKSCGGGGSGGGGSEVQLVESGGGLVQPGGSLKLSCAASGFTFNTYAMNWVRQASGKGLEWVGRIRSKYNNYATYYADSVKDRFTISRDDSKSTAYLQMNSLKTEDTAVYYCVRHGNFGNSYVSWFAYWGQGTLVTVSSGGGGSGGGGSGGGGSGGGGSQAVVTQEPSLTVSPGGTVTLTCRSSTGAVTTSNYANWVQQKPGQAPRGLIGGTNKRAPWTPARFSGSLLGDKAALTLSGAQPEDEAEYFCALWYSNLWVFGGGTKLTVLGGGGS

SEQ ID NO: 68 - protein, 491 aa, Artificial Sequence
  source: /note="Description of Artificial Sequence: Synthetic polypeptide"
EVQLVQSGAEVKKPGESLKISCKASGYSFTNYWMNWVRQMPGKGLEWMGMIHPSDSEIRLNQKFQGQVTLSVDKSIGTAYMQWSSLKASDTAMYYCSRWYYLSSPMDYWGQGTTVTVSSASTKGPSVFPLAPSSKSTSGGTAALGCLVKDYFPEPVTVSWNSGALTSGVHTFPAVLQSSGLYSLSSVVTVPSSSLGTQTYICNVNHKPSNTKVDKRVEPKSCGGGGSGGGGSEVQLVESGGGLVQPGGSLKLSCAASGFTFNTYAMNWVRQASGKGLEWVGRIRSKYNNYATYYADSVKDRFTISRDDSKSTLYLQMNSLKTEDTAVYYCVRHGNFGNSYVSWFAYWGQGTLVTVSSGGGGSGGGGSGGGGSGGGGSQAVVTQEPSLTVSPGGTVTLTCRSSTGAVTTSNYANWVQQKPGQAPRGLIGGTNKRAPWTPARFSGSLLGDKAALTLSGAQPEDEAEYFCALWYSNLWVFGGGTKLTVLGGGGS

SEQ ID NO: 69 - protein, 214 aa, Artificial Sequence
  source: /note="Description of Artificial Sequence: Synthetic polypeptide"
EIVMTQSPATLSVSPGERATLSCRASQDVGTAVAWYQQKPGQAPRLLIYWASTRHTGIPARFSGSGSGTEFTLTISSLQSEDFAVYFCQQYSSYPYTFGQGTKLEIKRTVAAPSVFIFPPSDEQLKSGTASVVCLLNNFYPREAKVQWKVDNALQSGNSQESVTEQDSKDSTYSLSSTLTLSKADYEKHKVYACEVTHQGLSSPVTKSFNRGEC

SEQ ID NO: 70 - protein, 138 aa, Artificial Sequence
  source: /note="Description of Artificial Sequence: Synthetic polypeptide"
DVQLQASGGGSVQAGGSLRLSCAASGYTIGPYCMGWFRQAPGKEREGVAAINMGGGITYYADSVKGRFTISQDNAKNTVYLLMNSLEPEDTAIYYCAADSTIYASYYECGHGLSTGGYGYDSWGQGTQVTVSSGGGGS

SEQ ID NO: 71 - protein, 223 aa, Artificial Sequence
  source: /note="Description of Artificial Sequence: Synthetic polypeptide"
QVQLVQSGAEVKKPGASVKVSCKASGYTFTTYWIQWVRQAPGQRLEWMGAVYPGDADTRYTQKFQGRVTLTADRSASTAYMELSSLRSEDTAVYYCGRDAGLEYYALDYWGQGTLVTVSSASTKGPSVFPLAPSSKSTSGGTAALGCLVKDYFPEPVTVSWNSGALTSGVHTFPAVLQSSGLYSLSSVVTVPSSSLGTQTYICNVNHKPSNTKVDKRVEPKSC

SEQ ID NO: 72 - protein, 259 aa, Artificial Sequence
  source: /note="Description of Artificial Sequence: Synthetic polypeptide"
EVQLVESGGGLVQPGGSLKLSCAASGFTFNTYAMNWVRQASGKGLEWVGRIRSKYNNYATYYADSVKDRFTISRDDSKSTLYLQMNSLKTEDTAVYYCVRHGNFGNSYVSWFAYWGQGTLVTVSSGGGGSGGGGSGGGGSGGGGSQAVVTQEPSLTVSPGGTVTLTCRSSTGAVTTSNYANWVQQKPGQAPRGLIGGTNKRAPWTPARFSGSLLGDKAALTLSGAQPEDEAEYFCALWYSNLWVFGGGTKLTVLGGGGS

SEQ ID NO: 73 - protein, 222 aa, Artificial Sequence
  source: /note="Description of Artificial Sequence: Synthetic polypeptide"
EVQLVQSGAEVKKPGESLKISCKASGYSFTNYWMNWVRQMPGKGLEWMGMIHPSDSEIRLNQKFQGQVTLSVDKSIGTAYMQWSSLKASDTAMYYCSRWYYLSSPMDYWGQGTTVTVSSASTKGPSVFPLAPSSKSTSGGTAALGCLVKDYFPEPVTVSWNSGALTSGVHTFPAVLQSSGLYSLSSVVTVPSSSLGTQTYICNVNHKPSNTKVDKRVEPKSC

SEQ ID NO: 74 - protein, 719 aa, Artificial Sequence
  source: /note="Description of Artificial Sequence: Synthetic polypeptide"
QVQLVQSGAEVKKPGASVKVSCKASGYTFTTYWIQWVRQAPGQRLEWMGAVYPGDADTRYTQKFQGRVTLTADRSASTAYMELSSLRSEDTAVYYCGRDAGLEYYALDYWGQGTLVTVSSASTKGPSVFPLAPSSKSTSGGTAALGCLVKDYFPEPVTVSWNSGALTSGVHTFPAVLQSSGLYSLSSVVTVPSSSLGTQTYICNVNHKPSNTKVDKRVEPKSCGGGGSGGGGSEVQLVESGGGLVQPGGSLKLSCAASGFTFNTYAMNWVRQASGKGLEWVGRIRSKYNNYATYYADSVKDRFTISRDDSKSTLYLQMNSLKTEDTAVYYCVRHGNFGNSYVSWFAYWGQGTLVTVSSGGGGSGGGGSGGGGSGGGGSQAVVTQEPSLTVSPGGTVTLTCRSSTGAVTTSNYANWVQQKPGQAPRGLIGGTNKRAPWTPARFSGSLLGDKAALTLSGAQPEDEAEYFCALWYSNLWVFGGGTKLTVLGGGGSDKTHTCPPCPAPELLGGPSVFLFPPKPKDTLMISRTPEVTCVVVAVSHEDPEVKFNWYVDGVEVHNAKTKPREEQYASTYRVVSVLTVLHQDWLNGKEYKCKVSNKALAAPIEKTISKAKGQPREPQVCTLPPSREEMTKNQVSLSCAVKGFYPSDIAVEWESNGQPENNYKTTPPVLDSDGSFFLVSKLTVDKSRWQQGNVFSCSVMHEALHNHYTQKSLSLSPGK

SEQ ID NO: 75 - protein, 326 aa, Artificial Sequence
  source: /note="Description of Artificial Sequence: Synthetic polypeptide"
SQQIYGVVYGNVTFHVPSNVPLKEVLWKKQKDKVAELENSEFRAFSSFKNRVYLDTVSGSLTIYNLTSSDEDEYEMESPNITDTMKFFLYVLESGGGGSDKTHTCPPCPAPELLGGPSVFLFPPKPKDTLMISRTPEVTCVVVAVSHEDPEVKFNWYVDGVEVHNAKTKPREEQYASTYRVVSVLTVLHQDWLNGKEYKCKVSNKALAAPIEKTISKAKGQPREPQVYTLPPCREEMTKNQVSLWCLVKGFYPSDIAVEWESNGQPENNYKTTPPVLDSDGSFFLYSKLTVDKSRWQQGNVFSCSVMHEALHNRYTQKSLSLSPGK

SEQ ID NO: 76 - protein, 719 aa, Artificial Sequence
  source: /note="Description of Artificial Sequence: Synthetic polypeptide"
QVQLVQSGAEVKKPGASVKVSCKASGYTFTTYWIQWVRQAPGQRLEWMGAVYPGDADTRYTQKFQGRVTLTADRSASTAYMELSSLRSEDTAVYYCGRDAGLEYYALDYWGQGTLVTVSSASTKGPSVFPLAPSSKSTSGGTAALGCLVKDYFPEPVTVSWNSGALTSGVHTFPAVLQSSGLYSLSSVVTVPSSSLGTQTYICNVNHKPSNTKVDKRVEPKSCGGGGSGGGGSEVQLVESGGGLVQPGGSLKLSCAASGFTFNTYAMNWVRQASGKGLEWVGRIRSKYNNYATYYADSVKDRFTISRDDSKNTAYLQMNSLKTEDTAVYYCVRHGNFGNSYVSWFAHWGQGTLVTVSSGGGGSGGGGSGGGGSGGGGSQAVVTQEPSLTVSPGGTVTLTCGSSTGAVTSSNYANWVQQKPGQAPRGLIGGTNKRAPWTPARFSGSLLGGKAALTLSGAQPEDEAEYYCALWYSNLWVFGGGTKLTVLGGGGSDKTHTCPPCPAPELLGGPSVFLFPPKPKDTLMISRTPEVTCVVVAVSHEDPEVKFNWYVDGVEVHNAKTKPREEQYASTYRVVSVLTVLHQDWLNGKEYKCKVSNKALAAPIEKTISKAKGQPREPQVCTLPPSREEMTKNQVSLSCAVKGFYPSDIAVEWESNGQPENNYKTTPPVLDSDGSFFLVSKLTVDKSRWQQGNVFSCSVMHEALHNHYTQKSLSLSPGK

SEQ ID NO: 77 - protein, 719 aa, Artificial Sequence
  source: /note="Description of Artificial Sequence: Synthetic polypeptide"
QVQLVQSGAEVKKPGASVKVSCKASGYTFTTYWIQWVRQAPGQRLEWMGAVYPGDADTRYTQKFQGRVTLTADRSASTAYMELSSLRSEDTAVYYCGRDAGLEYYALDYWGQGTLVTVSSASTKGPSVFPLAPSSKSTSGGTAALGCLVKDYFPEPVTVSWNSGALTSGVHTFPAVLQSSGLYSLSSVVTVPSSSLGTQTYICNVNHKPSNTKVDKRVEPKSCGGGGSGGGGSEVQLVESGGGLVQPGGSLKLSCAASGFTFNTYAMNWVRQASGKGLEWVGRIRSKYNNYATYYADSVKDRFTISRDDSKSTAYLQMNSLKTEDTAVYYCVRHGNFGNSYVSWFAYWGQGTLVTVSSGGGGSGGGGSGGGGSGGGGSQAVVTQEPSLTVSPGGTVTLTCRSSTGAVTTSNYANWVQQKPGQAPRGLIGGTNKRAPWTPARFSGSLLGDKAALTLSGAQPEDEAEYFCALWYSNLWVFGGGTKLTVLGGGGSDKTHTCPPCPAPELLGGPSVFLFPPKPKDTLMISRTPEVTCVVVAVSHEDPEVKFNWYVDGVEVHNAKTKPREEQYASTYRVVSVLTVLHQDWLNGKEYKCKVSNKALAAPIEKTISKAKGQPREPQVCTLPPSREEMTKNQVSLSCAVKGFYPSDIAVEWESNGQPENNYKTTPPVLDSDGSFFLVSKLTVDKSRWQQGNVFSCSVMHEALHNHYTQKSLSLSPGK

SEQ ID NO: 78 - protein, 718 aa, Artificial Sequence
  source: /note="Description of Artificial Sequence: Synthetic polypeptide"
EVQLVQSGAEVKKPGESLKISCKASGYSFTNYWMNWVRQMPGKGLEWMGMIHPSDSEIRLNQKFQGQVTLSVDKSIGTAYMQWSSLKASDTAMYYCSRWYYLSSPMDYWGQGTTVTVSSASTKGPSVFPLAPSSKSTSGGTAALGCLVKDYFPEPVTVSWNSGALTSGVHTFPAVLQSSGLYSLSSVVTVPSSSLGTQTYICNVNHKPSNTKVDKRVEPKSCGGGGSGGGGSEVQLVESGGGLVQPGGSLKLSCAASGFTFNTYAMNWVRQASGKGLEWVGRIRSKYNNYATYYADSVKDRFTISRDDSKSTLYLQMNSLKTEDTAVYYCVRHGNFGNSYVSWFAYWGQGTLVTVSSGGGGSGGGGSGGGGSGGGGSQAVVTQEPSLTVSPGGTVTLTCRSSTGAVTTSNYANWVQQKPGQAPRGLIGGTNKRAPWTPARFSGSLLGDKAALTLSGAQPEDEAEYFCALWYSNLWVFGGGTKLTVLGGGGSDKTHTCPPCPAPELLGGPSVFLFPPKPKDTLMISRTPEVTCVVVAVSHEDPEVKFNWYVDGVEVHNAKTKPREEQYASTYRVVSVLTVLHQDWLNGKEYKCKVSNKALAAPIEKTISKAKGQPREPQVCTLPPSREEMTKNQVSLSCAVKGFYPSDIAVEWESNGQPENNYKTTPPVLDSDGSFFLVSKLTVDKSRWQQGNVFSCSVMHEALHNHYTQKSLSLSPGK

SEQ ID NO: 79 - protein, 365 aa, Artificial Sequence
  source: /note="Description of Artificial Sequence: Synthetic polypeptide"
DVQLQASGGGSVQAGGSLRLSCAASGYTIGPYCMGWFRQAPGKEREGVAAINMGGGITYYADSVKGRFTISQDNAKNTVYLLMNSLEPEDTAIYYCAADSTIYASYYECGHGLSTGGYGYDSWGQGTQVTVSSGGGGSDKTHTCPPCPAPELLGGPSVFLFPPKPKDTLMISRTPEVTCVVVAVSHEDPEVKFNWYVDGVEVHNAKTKPREEQYASTYRVVSVLTVLHQDWLNGKEYKCKVSNKALAAPIEKTISKAKGQPREPQVYTLPPCREEMTKNQVSLWCLVKGFYPSDIAVEWESNGQPENNYKTTPPVLDSDGSFFLYSKLTVDKSRWQQGNVFSCSVMHEALHNRYTQKSLSLSPGK

SEQ ID NO: 80 - protein, 450 aa, Artificial Sequence
  source: /note="Description of Artificial Sequence: Synthetic polypeptide"
QVQLVQSGAEVKKPGASVKVSCKASGYTFTTYWIQWVRQAPGQRLEWMGAVYPGDADTRYTQKFQGRVTLTADRSASTAYMELSSLRSEDTAVYYCGRDAGLEYYALDYWGQGTLVTVSSASTKGPSVFPLAPSSKSTSGGTAALGCLVKDYFPEPVTVSWNSGALTSGVHTFPAVLQSSGLYSLSSVVTVPSSSLGTQTYICNVNHKPSNTKVDKRVEPKSCDKTHTCPPCPAPELLGGPSVFLFPPKPKDTLMISRTPEVTCVVVAVSHEDPEVKFNWYVDGVEVHNAKTKPREEQYASTYRVVSVLTVLHQDWLNGKEYKCKVSNKALAAPIEKTISKAKGQPREPQVCTLPPSREEMTKNQVSLSCAVKGFYPSDIAVEWESNGQPENNYKTTPPVLDSDGSFFLVSKLTVDKSRWQQGNVFSCSVMHEALHNHYTQKSLSLSPGK

SEQ ID NO: 81 - protein, 486 aa, Artificial Sequence
  source: /note="Description of Artificial Sequence: Synthetic polypeptide"
EVQLVESGGGLVQPGGSLKLSCAASGFTFNTYAMNWVRQASGKGLEWVGRIRSKYNNYATYYADSVKDRFTISRDDSKSTLYLQMNSLKTEDTAVYYCVRHGNFGNSYVSWFAYWGQGTLVTVSSGGGGSGGGGSGGGGSGGGGSQAVVTQEPSLTVSPGGTVTLTCRSSTGAVTTSNYANWVQQKPGQAPRGLIGGTNKRAPWTPARFSGSLLGDKAALTLSGAQPEDEAEYFCALWYSNLWVFGGGTKLTVLGGGGSDKTHTCPPCPAPELLGGPSVFLFPPKPKDTLMISRTPEVTCVVVAVSHEDPEVKFNWYVDGVEVHNAKTKPREEQYASTYRVVSVLTVLHQDWLNGKEYKCKVSNKALAAPIEKTISKAKGQPREPQVYTLPPCREEMTKNQVSLWCLVKGFYPSDIAVEWESNGQPENNYKTTPPVLDSDGSFFLYSKLTVDKSRWQQGNVFSCSVMHEALHNRYTQKSLSLSPGK

SEQ ID NO: 82 - protein, 449 aa, Artificial Sequence
  source: /note="Description of Artificial Sequence: Synthetic polypeptide"
EVQLVQSGAEVKKPGESLKISCKASGYSFTNYWMNWVRQMPGKGLEWMGMIHPSDSEIRLNQKFQGQVTLSVDKSIGTAYMQWSSLKASDTAMYYCSRWYYLSSPMDYWGQGTTVTVSSASTKGPSVFPLAPSSKSTSGGTAALGCLVKDYFPEPVTVSWNSGALTSGVHTFPAVLQSSGLYSLSSVVTVPSSSLGTQTYICNVNHKPSNTKVDKRVEPKSCDKTHTCPPCPAPELLGGPSVFLFPPKPKDTLMISRTPEVTCVVVAVSHEDPEVKFNWYVDGVEVHNAKTKPREEQYASTYRVVSVLTVLHQDWLNGKEYKCKVSNKALAAPIEKTISKAKGQPREPQVCTLPPSREEMTKNQVSLSCAVKGFYPSDIAVEWESNGQPENNYKTTPPVLDSDGSFFLVSKLTVDKSRWQQGNVFSCSVMHEALHNHYTQKSLSLSPGK

SEQ ID NO: 83 - protein, 227 aa, Artificial Sequence
  source: /note="Description of Artificial Sequence: Synthetic polypeptide"
DKTHTCPPCPAPELLGGPSVFLFPPKPKDTLMISRTPEVTCVVVAVSHEDPEVKFNWYVDGVEVHNAKTKPREEQYASTYRVVSVLTVLHQDWLNGKEYKCKVSNKALAAPIEKTISKAKGQPREPQVYTLPPCREEMTKNQVSLWCLVKGFYPSDIAVEWESNGQPENNYKTTPPVLDSDGSFFLYSKLTVDKSRWQQGNVFSCSVMHEALHNRYTQKSLSLSPGK

SEQ ID NO: 84 - protein, 727 aa, Artificial Sequence
  source: /note="Description of Artificial Sequence: Synthetic polypeptide"
QVQLQQSGPGLVKPSQTLSLTCAISGDSVSSNSAAWSWIRQSPGRGLEWLGRIYYRSKWYNDYAVSVKSRITINPDTSKNQFSLQLNSVTPEDTAVYYCARLDHRYHEDTVYPGMDVWGQGTLVTVSSASTKGPSVFPLAPSSKSTSGGTAALGCLVKDYFPEPVTVSWNSGALTSGVHTFPAVLQSSGLYSLSSVVTVPSSSLGTQTYICNVNHKPSNTKVDKRVEPKSCGGGGSGGGGSEVQLVESGGGLVQPGGSLKLSCAASGFTFNTYAMNWVRQASGKGLEWVGRIRSKYNNYATYYADSVKDRFTISRDDSKSTLYLQMNSLKTEDTAVYYCVRHGNFGNSYVSWFAYWGQGTLVTVSSGGGGSGGGGSGGGGSGGGGSQAVVTQEPSLTVSPGGTVTLTCRSSTGAVTTSNYANWVQQKPGQAPRGLIGGTNKRAPWTPARFSGSLLGDKAALTLSGAQPEDEAEYFCALWYSNLWVFGGGTKLTVLGGGGSDKTHTCPPCPAPELLGGPSVFLFPPKPKDTLMISRTPEVTCVVVAVSHEDPEVKFNWYVDGVEVHNAKTKPREEQYASTYRVVSVLTVLHQDWLNGKEYKCKVSNKALAAPIEKTISKAKGQPREPQVCTLPPSREEMTKNQVSLSCAVKGFYPSDIAVEWESNGQPENNYKTTPPVLDSDGSFFLVSKLTVDKSRWQQGNVFSCSVMHEALHNHYTQKSLSLSPGK

SEQ ID NO: 85 - protein, 213 aa, Artificial Sequence
  source: /note="Description of Artificial Sequence: Synthetic polypeptide"
DIELTQPPSVSVAPGQTARISCSGDNLPAYTVTWYQQKPGQAPVLVIYDDSDRPSGIPERFSGSNSGNTATLTISGTQAEDEADYYCASWDPSSGVVFGGGTKLTVLGQPKAAPSVTLFPPSSEELQANKATLVCLISDFYPGAVTVAWKADSSPVKAGVETTTPSKQSNNKYAASSYLSLTPEQWKSHRSYSCQVTHEGSTVEKTVAPTECS

SEQ ID NO: 86 - protein, 326 aa, Artificial Sequence
  source: /note="Description of Artificial Sequence: Synthetic polypeptide"
SQQIYGVVYGNVTFHVPSNVPLKEVLWKKQKDKVAELENSEFRAFSSFKNRVYLDTVSGSLTIYNLTSSDEDEYEMESPNITDTMKFFLYVLESGGGGSDKTHTCPPCPAPELLGGPSVFLFPPKPKDTLMISRTPEVTCVVVAVSHEDPEVKFNWYVDGVEVHNAKTKPREEQYASTYRVVSVLTVLHQDWLNGKEYKCKVSNKALAAPIEKTISKAKGQPREPQVYTLPPCREEMTKNQVSLWCLVKGFYPSDIAVEWESNGQPENNYKTTPPVLDSDGSFFLYSKLTVDKSRWQQGNVFSCSVMHEALHNHYTQKSLSLSPGK

SEQ ID NO: 87 - protein, 227 aa, Artificial Sequence
  source: /note="Description of Artificial Sequence: Synthetic polypeptide"
DKTHTCPPCPAPELLGGPSVFLFPPKPKDTLMISRTPEVTCVVVAVSHEDPEVKFNWYVDGVEVHNAKTKPREEQYASTYRVVSVLTVLHQDWLNGKEYKCKVSNKALAAPIEKTISKAKGQPREPQVYTLPPCREEMTKNQVSLWCLVKGFYPSDIAVEWESNGQPENNYKTTPPVLDSDGSFFLYSKLTVDKSRWQQGNVFSCSVMHEALHNHYTQKSLSLSPGK

SEQ ID NO: 88 - DNA, 2205 bp, Artificial Sequence
  source: /note="Description of Artificial Sequence: Synthetic polynucleotide"
atgccactgctgcttctactgccactcctgtgggcaggagcactggcccaagtgcaactggtgcagtccggtgccgaagtgaagaagcccggtgcctctgtgaaggtgtcctgcaaggcgtcgggatacacgttcaccacttactggattcagtgggtcagacaggccccgggacagagactggagtggatgggagccgtgtaccccggagatgcagacactcgctacacccagaagttccagggccgcgtgactttgaccgccgacagaagcgccagcaccgcctacatggagctttcatccctccggagcgaggatactgccgtatactattgcggaagggatgccggcctggaatactatgccctcgactactggggacaggggaccctcgtgactgtgtccagcgcgagcaccaagggccccagcgtgttcccgctggccccatcatccaagtccacctcgggagggactgctgcgctcggttgccttgtgaaggactacttccccgagcccgtgactgtgtcgtggaacagcggggctctgaccagcggggttcacacctttcccgccgtgctgcagtcctcgggactctacagcctgtcctccgtggtcacggtcccgtcgtcgtcgctggggacccagacctacatttgcaacgtgaaccacaaaccctccaacacaaaagtggacaaaagggtggaacctaagtcctgtggagggggtggatcaggcggaggaggatcggaagtccagctcgtcgaatcagggggagggcttgtgcaaccaggaggctccctcaagctgtcttgcgcagcgtccggtttcactttcaacacttatgcgatgaattgggtccgccaagccagtgggaagggcctggagtgggtcggacggatcagatccaagtacaacaactacgcgacatactacgccgactccgtgaaggatcgcttcaccatcagccgggatgactccaagagcaccttgtacctccaaatgaacagccttaagaccgaggacactgcggtgtactactgcgtgagacacggcaacttcggaaactcctacgtgtcctggttcgcctactggggacagggcacccttgtcactgtgtcaagcggaggcggtggttcgggtggcggaggttccggaggaggaggttcgggcggtggtggatcacaggccgtcgtgactcaggaaccatccctgactgtgtcccccggtggaaccgtgaccctcacctgtcgctcctcaaccggagccgtgaccacctccaactacgctaattgggtgcagcagaagccaggacaagccccacggggactgattgggggcaccaacaagagggctccttggaccccagcccgcttctcgggctccctgttgggcgacaaggccgctctgaccctgtccggtgcacagccggaggatgaagccgaatacttctgcgcgctgtggtactccaacctctgggtgttcggcggagggaccaagctgactgtgttgggaggaggggggagtgacaagactcacacgtgtccgccttgcccagcacccgagctactgggaggaccgagcgtgttcctgtttcccccgaagccgaaggataccctgatgatctcccgcactcctgaagtgacttgcgtggtggtggcagtgtcccacgaggacccggaagtcaagtttaattggtacgtggatggcgtggaggtgcacaacgcaaagaccaagcctcgcgaggagcagtacgccagcacctaccgggtggtgtccgtcctgacggtgctgcaccaggactggctgaacgggaaggagtacaagtgcaaagtgtcaaataaggctttggccgcccctattgagaaaaccatctcaaaggccaagggccaacccagggaacctcaagtgtgcaccctcccaccttcgcgagaagagatgaccaagaaccaggtgtccctgtcctgcgccgtgaagggcttctacccctccgatatcgccgtggagtgggaatctaacggacagccggagaacaactacaagaccactccgccggtgctggacagcgacggctccttcttcctcgtgtcgaaactgaccgtggacaagtcacggtggcagcagggcaatgtgttcagctgctcagtcatgcatgaggccctccacaaccactacactcagaagtccctgtcgctttcccccggaaaa

SEQ ID NO: 89 - DNA, 705 bp, Artificial Sequence
  source: /note="Description of Artificial Sequence: Synthetic polynucleotide"
atgtcggtcctgacccaagtgctggccctccttctcctgtggctgaccgggaccagatgcgaaatcgtcatgactcagagcccggcaaccctgtccgtgagccctggagaacgggccactctgagctgtcgggcgtcacaggacgtgggaactgccgtggcctggtatcagcagaagccgggacaggctcctaggttgctcatctactgggcgtccactcgccacaccggaatcccagcccgcttctccggctcgggttctggcaccgagttcaccctgaccatttcctccctccaatccgaggatttcgccgtgtacttctgccaacaatacgccaacttccccctgtacacatttggccaggggaccaagctggagattaagcgtacggtggccgctcccagcgtgttcatcttcccccccagcgacgagcagctgaagagcggcaccgccagcgtggtgtgcctgctgaacaacttctacccccgggaggccaaggtgcagtggaaggtggacaacgccctgcagagcggcaacagccaggagagcgtcaccgagcaggacagcaaggactccacctacagcctgagcagcaccctgaccctgagcaaggccgactacgagaagcataaggtgtacgcctgcgaggtgacccaccagggcctgtccagccccgtgaccaagagcttcaacaggggcgagtgc

SEQ ID NO: 90 - DNA, 1026 bp, Artificial Sequence
  source: /note="Description of Artificial Sequence: Synthetic polynucleotide"
atgcctctgctgctcctgctgcctctgctctgggccggagctttggcatcacagcaaatctacggcgtggtgtacggcaacgtgaccttccatgtcccctccaatgtgccgctgaaggaagtgctctggaagaagcagaaggacaaggtcgcggaactggaaaactccgagtttcgcgccttctcctccttcaaaaaccgggtgtacctggacaccgtgtccgggagccttactatctacaacctgacctcctcggacgaggatgagtatgagatggagagcccaaacattaccgacaccatgaagttcttcctctacgtgctggaatcgggtggaggcggaagcgataagactcacacgtgtccaccttgtcccgcacccgaactcctggggggaccttccgtgtttctcttcccccctaaaccgaaggacaccttgatgatctcccgcactcctgaagtgacctgtgtggtggtggccgtgtcccacgaggacccagaagtcaagtttaattggtacgtggacggagtcgaggtgcacaacgcgaaaaccaaaccgcgggaggagcagtacgcctccacctaccgggtggtgtccgtcctcactgtgctgcaccaggactggctcaacggaaaggagtacaagtgcaaagtgtccaacaaagccttggcggccccaatcgaaaagacgatctccaaggccaagggacagccgcgcgaacctcaagtctacaccctgcctccttgccgcgaggaaatgaccaagaaccaggtgtcactgtggtgtctggtcaagggattctacccttccgatatcgcagtggagtgggaaagcaacggccaaccagagaacaactataagaccacacccccggtgctcgattccgacggctcattcttcctgtactccaagctgaccgtggacaagtcacggtggcagcaggggaacgtgttcagctgctccgtgatgcatgaagccctgcacaatcattacactcagaagtccctgtcgctgagccccggaaaa

SEQ ID NO: 91 - DNA, 2205 bp, Artificial Sequence
  source: /note="Description of Artificial Sequence: Synthetic polynucleotide"
atgccactgctgcttctactgccactcctgtgggcaggagcactggcccaagtgcaactggtgcagtccggtgccgaagtgaagaagcccggtgcctctgtgaaggtgtcctgcaaggcgtcgggatacacgttcaccacttactggattcagtgggtcagacaggccccgggacagagactggagtggatgggagccgtgtaccccggagatgcagacactcgctacacccagaagttccagggccgcgtgactttgaccgccgacagaagcgccagcaccgcctacatggagctttcatccctccggagcgaggatactgccgtatactattgcggaagggatgccggcctggaatactatgccctcgactactggggacaggggaccctcgtgactgtgtccagcgcgagcaccaagggcccgagcgtgttcccattggccccgtcgtcaaagtccacctctggcggaactgcggctctgggatgtctcgtgaaggactactttccggaacccgtgactgtgtcctggaacagcggcgccctcacttccggcgtgcataccttccctgccgtgctgcagtcctccggcctgtacagcctcagcagcgtcgtgactgtgccctcctcgtccttgggcacccagacctacatctgcaacgtcaaccacaagccctcgaacaccaaagtggataagcgggtggaacccaagagctgtggagggggtggctcaggaggagggggatccgaagtgcagctcgtggagtccggaggaggcctggtgcagcctgggggatccctcaagcttagctgcgccgcatcaggcttcaccttcaacacctacgccatgaactgggtccgccaagcatccggaaagggcctggaatgggtcgggagaatcagatccaagtacaacaactacgccacgtactacgcggactccgtcaaggaccggttcactattagccgggatgactccaagaataccgcgtaccttcagatgaactcgctcaaaaccgaggacactgccgtgtattactgcgtgcggcacggaaacttcgggaacagttacgtgtcctggttcgcccattggggtcaaggcaccctggtcaccgtgtcctcgggtggtggtggctccggtggaggaggatcggggggtggaggatctgggggaggcggatcacaggcggtcgtgactcaggagccctccctgaccgtgtcgcctggtggcaccgtgactctgacttgcggaagctcaacaggcgccgtgacctcctcgaactacgccaactgggtgcaacagaagccgggacaagcccctaggggactgatcggggggaccaacaagcgcgctccgtggactcccgcgaggttctccggaagcctcctgggagggaaggcagccctgaccctgtccggagctcagccagaagatgaggccgagtactattgcgccctgtggtactcgaatctgtgggtgtttggaggcggcaccaagctgaccgtcctgggtggtggcggaagcgacaagactcacacgtgtccgccttgcccagcacccgagctactgggaggaccgagcgtgttcctgtttcccccgaagccgaaggataccctgatgatctcccgcactcctgaagtgacttgcgtggtggtggcagtgtcccacgaggacccggaagtcaagtttaattggtacgtggatggcgtggaggtgcacaacgcaaagaccaagcctcgcgaggagcagtacgccagcacctaccgggtggtgtccgtcctgacggtgctgcaccaggactggctgaacgggaaggagtacaagtgcaaagtgtcaaataaggctttggccgcccctattgagaaaaccatctcaaaggccaagggccaacccagggaacctcaagtgtgcaccctcccaccttcgcgagaagagatgaccaagaaccaggtgtccctgtcctgcgccgtgaagggcttctacccctccgatatcgccgtggagtgggaatctaacggacagccggagaacaactacaagaccactccgccggtgctggacagcgacggctccttcttcctcgtgtcgaaactgaccgtggacaagtcacggtggcagcagggcaatgtgttcagctgctcagtcatgcatgaggccctccacaaccactacactcagaagtccctgtcgctttcccccggaaaa

SEQ ID NO: 92 - DNA, 645 bp, Artificial Sequence
  source: /note="Description of Artificial Sequence: Synthetic polynucleotide"
gaaatcgtcatgactcagagcccggcaaccctgtccgtgagccctggagaacgggccactctgagctgtcgggcgtcacaggacgtgggaactgccgtggcctggtatcagcagaagccgggacaggctcctaggttgctcatctactgggcgtccactcgccacaccggaatcccagcccgcttctccggctcgggttctggcaccgagttcaccctgaccatttcctccctccaatccgaggatttcgccgtgtacttctgccaacaatacgccaacttccccctgtacacatttggccaggggaccaagctggagattaagcgtacggtggccgctcccagcgtgttcatcttcccccccagcgacgagcagctgaagagcggcaccgccagcgtggtgtgcctgctgaacaacttctacccccgggaggccaaggtgcagtggaaggtggacaacgccctgcagagcggcaacagccaggagagcgtcaccgagcaggacagcaaggactccacctacagcctgagcagcaccctgaccctgagcaaggccgactacgagaagcataaggtgtacgcctgcgaggtgacccaccagggcctgtccagccccgtgaccaagagcttcaacaggggcgagtgc

SEQ ID NO: 93 - DNA, 729 bp, Artificial Sequence
  source: /note="Description of Artificial Sequence: Synthetic polynucleotide"
atgcctctgctgctcctgctgcctctgctctgggccggagctttggcagataagactcacacgtgtccaccttgtcccgcacccgaactcctggggggaccttccgtgtttctcttcccccctaaaccgaaggacaccttgatgatctcccgcactcctgaagtgacctgtgtggtggtggccgtgtcccacgaggacccagaagtcaagtttaattggtacgtggacggagtcgaggtgcacaacgcgaaaaccaaaccgcgggaggagcagtacgcctccacctaccgggtggtgtccgtcctcactgtgctgcaccaggactggctcaacggaaaggagtacaagtgcaaagtgtccaacaaagccttggcggccccaatcgaaaagacgatctccaaggccaagggacagccgcgcgaacctcaagtctacaccctgcctccttgccgcgaggaaatgaccaagaaccaggtgtcactgtggtgtctggtcaagggattctacccttccgatatcgcagtggagtgggaaagcaacggccaaccagagaacaactataagaccacacccccggtgctcgattccgacggctcattcttcctgtactccaagctgaccgtggacaagtcacggtggcagcaggggaacgtgttcagctgctccgtgatgcatgaagccctgcacaatcattacactcagaagtccctgtcgctgagccccggaaaa

SEQ ID NO: 94 - DNA, 2229 bp, Artificial Sequence
  source: /note="Description of Artificial Sequence: Synthetic polynucleotide"
atgcctctgctgctcctgttgcccctgctgtgggctggagccttggcccaagtgcagcttcagcagtcgggacccggactcgtgaagccgtcgcagacgctgtccctgacctgtgccattagcggcgactccgtgagcagcaacagcgcagcctggtcctggattcggcagtcacctggtcgggggcttgaatggctgggacggatctactaccgctcgaaatggtataacgactacgccgtgtctgtgaagtccaggatcaccatcaacccggacacctccaagaatcagttctccctccaactgaactcagtgaccccagaggacaccgccgtctactactgcgcgagactggatcaccgctaccatgaagataccgtgtacccggggatggacgtctggggccagggtactctcgtcactgtgtcctccgcgtccactaagggccccagcgtgttcccgctggccccatcatccaagtccacctcgggagggactgctgcgctcggttgccttgtgaaggactacttccccgagcccgtgactgtgtcgtggaacagcggggctctgaccagcggggttcacacctttcccgccgtgctgcagtcctcgggactctacagcctgtcctccgtggtcacggtcccgtcgtcgtcgctggggacccagacctacatttgcaacgtgaaccacaaaccctccaacacaaaagtggacaaaagggtggaacctaagtcctgtggagggggtggatcaggcggaggaggatcggaagtccagctcgtcgaatcagggggagggcttgtgcaaccaggaggctccctcaagctgtcttgcgcagcgtccggtttcactttcaacacttatgcgatgaattgggtccgccaagccagtgggaagggcctggagtgggtcggacggatcagatccaagtacaacaactacgcgacatactacgccgactccgtgaaggatcgcttcaccatcagccgggatgactccaagagcaccttgtacctccaaatgaacagccttaagaccgaggacactgcggtgtactactgcgtgagacacggcaacttcggaaactcctacgtgtcctggttcgcctactggggacagggcacccttgtcactgtgtcaagcggaggcggtggttcgggtggcggaggttccggaggaggaggttcgggcggtggtggatcacaggccgtcgtgactcaggaaccatccctgactgtgtcccccggtggaaccgtgaccctcacctgtcgctcctcaaccggagccgtgaccacctccaactacgctaattgggtgcagcagaagccaggacaagccccacggggactgattgggggcaccaacaagagggctccttggaccccagcccgcttctcgggctccctgttgggcgacaaggccgctctgaccctgtccggtgcacagccggaggatgaagccgaatacttctgcgcgctgtggtactccaacctctgggtgttcggcggagggaccaagctgactgtgttgggaggaggggggagtgacaagactcacacgtgtccgccttgcccagcacccgagctactgggaggaccgagcgtgttcctgtttcccccgaagccgaaggataccctgatgatctcccgcactcctgaagtgacttgcgtggtggtggcagtgtcccacgaggacccggaagtcaagtttaattggtacgtggatggcgtggaggtgcacaacgcaaagaccaagcctcgcgaggagcagtacgccagcacctaccgggtggtgtccgtcctgacggtgctgcaccaggactggctgaacgggaaggagtacaagtgcaaagtgtcaaataaggctttggccgcccctattgagaaaaccatctcaaaggccaagggccaacccagggaacctcaagtgtgcaccctcccaccttcgcgagaagagatgaccaagaaccaggtgtccctgtcctgcgccgtgaagggcttctacccctccgatatcgccgtggagtgggaatctaacggacagccggagaacaactacaagaccactccgccggtgctggacagcgacggctccttcttcctcgtgtcgaaactgaccgtggacaagtcacggtggcagcagggcaatgtgttcagctgctcagtcatgcatgaggccctccacaaccactacactcagaagtccctgtcgctttcccccggaaaa

SEQ ID NO: 95 - DNA, 699 bp, Artificial Sequence
  source: /note="Description of Artificial Sequence: Synthetic polynucleotide"
atgtccgtgctgacccaagtcttggcgctgctgctgctgtggctcactggcacccgctgtgacattgaactgacccagccgccttcagtgtccgtggcacccggacagaccgcgaggattagctgctccggggacaacctcccggcctacactgtgacctggtatcagcagaagcccggacaagcccctgtgcttgtcatctacgacgactcggatcggccaagcggcatccccgagagattctccggctcgaacagcgggaacaccgccacgctcactatctcgggaacccaggccgaagatgaggctgactactactgcgcctcatgggatccgtcctccggagtggtgttcggtggcggaactaagctgaccgtgctgggtcagcctaaggcggcgccctcagtgaccctgttccctccgtcgtctgaagaactccaggccaacaaggccaccctcgtgtgcctgatttcggacttctacccgggagccgtcactgtggcctggaaggccgacagcagcccagtgaaggccggcgtggaaactaccaccccgtccaagcagtccaacaataagtacgcagccagctcctacctgtccctgacccccgaacaatggaagtcacacagatcctactcctgtcaagtcacccacgagggcagcactgtcgaaaagaccgtggcaccgactgagtgctcg

SEQ ID NO: 96 - protein, 242 aa, Artificial Sequence
  source: /note="Description of Artificial Sequence: Synthetic polypeptide"
EIVMTQSPATLSLSPGERATLSCRASQDISKYLNWYQQKPGQAPRLLIYHTSRLHSGIPARFSGSGSGTDYTLTISSLQPEDFAVYFCQQGNTLPYTFGQGTKLEIKGGGGSGGGGSGGGGSQVQLQESGPGLVKPSETLSLTCTVSGVSLPDYGVSWIRQPPGKGLEWIGVIWGSETTYYSSSLKSRVTISKDNSKNQVSLKLSSVTAADTAVYYCAKHYYYGGSYAMDYWGQGTLVTVSS

SEQ ID NO: 97 - protein, 242 aa, Artificial Sequence
  source: /note="Description of Artificial Sequence: Synthetic polypeptide"
EIVMTQSPATLSLSPGERATLSCRASQDISKYLNWYQQKPGQAPRLLIYHTSRLHSGIPARFSGSGSGTDYTLTISSLQPEDFAVYFCQQGNTLPYTFGQGTKLEIKGGGGSGGGGSGGGGSQVQLQESGPGLVKPSETLSLTCTVSGVSLPDYGVSWIRQPPGKGLEWIGVIWGSETTYYQSSLKSRVTISKDNSKNQVSLKLSSVTAADTAVYYCAKHYYYGGSYAMDYWGQGTLVTVSS

SEQ ID NO: 98 - protein, 242 aa, Artificial Sequence
  source: /note="Description of Artificial Sequence: Synthetic polypeptide"
QVQLQESGPGLVKPSETLSLTCTVSGVSLPDYGVSWIRQPPGKGLEWIGVIWGSETTYYSSSLKSRVTISKDNSKNQVSLKLSSVTAADTAVYYCAKHYYYGGSYAMDYWGQGTLVTVSSGGGGSGGGGSGGGGSEIVMTQSPATLSLSPGERATLSCRASQDISKYLNWYQQKPGQAPRLLIYHTSRLHSGIPARFSGSGSGTDYTLTISSLQPEDFAVYFCQQGNTLPYTFGQGTKLEIK

SEQ ID NO: 99 - protein, 242 aa, Artificial Sequence
  source: /note="Description of Artificial Sequence: Synthetic polypeptide"
QVQLQESGPGLVKPSETLSLTCTVSGVSLPDYGVSWIRQPPGKGLEWIGVIWGSETTYYQSSLKSRVTISKDNSKNQVSLKLSSVTAADTAVYYCAKHYYYGGSYAMDYWGQGTLVTVSSGGGGSGGGGSGGGGSEIVMTQSPATLSLSPGERATLSCRASQDISKYLNWYQQKPGQAPRLLIYHTSRLHSGIPARFSGSGSGTDYTLTISSLQPEDFAVYFCQQGNTLPYTFGQGTKLEIK

SEQ ID NO: 100 - protein, 247 aa, Artificial Sequence
  source: /note="Description of Artificial Sequence: Synthetic polypeptide"
EIVMTQSPATLSLSPGERATLSCRASQDISKYLNWYQQKPGQAPRLLIYHTSRLHSGIPARFSGSGSGTDYTLTISSLQPEDFAVYFCQQGNTLPYTFGQGTKLEIKGGGGSGGGGSGGGGSGGGGSQVQLQESGPGLVKPSETLSLTCTVSGVSLPDYGVSWIRQPPGKGLEWIGVIWGSETTYYSSSLKSRVTISKDNSKNQVSLKLSSVTAADTAVYYCAKHYYYGGSYAMDYWGQGTLVTVSS

SEQ ID NO: 101 - protein, 247 aa, Artificial Sequence
  source: /note="Description of Artificial Sequence: Synthetic polypeptide"
EIVMTQSPATLSLSPGERATLSCRASQDISKYLNWYQQKPGQAPRLLIYHTSRLHSGIPARFSGSGSGTDYTLTISSLQPEDFAVYFCQQGNTLPYTFGQGTKLEIKGGGGSGGGGSGGGGSGGGGSQVQLQESGPGLVKPSETLSLTCTVSGVSLPDYGVSWIRQPPGKGLEWIGVIWGSETTYYQSSLKSRVTISKDNSKNQVSLKLSSVTAADTAVYYCAKHYYYGGSYAMDYWGQGTLVTVSS

SEQ ID NO: 102 - protein, 247 aa, Artificial Sequence
  source: /note="Description of Artificial Sequence: Synthetic polypeptide"
QVQLQESGPGLVKPSETLSLTCTVSGVSLPDYGVSWIRQPPGKGLEWIGVIWGSETTYYSSSLKSRVTISKDNSKNQVSLKLSSVTAADTAVYYCAKHYYYGGSYAMDYWGQGTLVTVSSGGGGSGGGGSGGGGSGGGGSEIVMTQSPATLSLSPGERATLSCRASQDISKYLNWYQQKPGQAPRLLIYHTSRLHSGIPARFSGSGSGTDYTLTISSLQPEDFAVYFCQQGNTLPYTFGQGTKLEIK

SEQ ID NO: 103 - protein, 247 aa, Artificial Sequence
  source: /note="Description of Artificial Sequence: Synthetic polypeptide"
QVQLQESGPGLVKPSETLSLTCTVSGVSLPDYGVSWIRQPPGKGLEWIGVIWGSETTYYQSSLKSRVTISKDNSKNQVSLKLSSVTAADTAVYYCAKHYYYGGSYAMDYWGQGTLVTVSSGGGGSGGGGSGGGGSGGGGSEIVMTQSPATLSLSPGERATLSCRASQDISKYLNWYQQKPGQAPRLLIYHTSRLHSGIPARFSGSGSGTDYTLTISSLQPEDFAVYFCQQGNTLPYTFGQGTKLEIK

SEQ ID NO: 104 - protein, 247 aa, Artificial Sequence
  source: /note="Description of Artificial Sequence: Synthetic polypeptide"
EIVMTQSPATLSLSPGERATLSCRASQDISKYLNWYQQKPGQAPRLLIYHTSRLHSGIPARFSGSGSGTDYTLTISSLQPEDFAVYFCQQGNTLPYTFGQGTKLEIKGGGGSGGGGSGGGGSGGGGSQVQLQESGPGLVKPSETLSLTCTVSGVSLPDYGVSWIRQPPGKGLEWIGVIWGSETTYYNSSLKSRVTISKDNSKNQVSLKLSSVTAADTAVYYCAKHYYYGGSYAMDYWGQGTLVTVSS

SEQ ID NO: 105 - protein, 247 aa, Artificial Sequence
  source: /note="Description of Artificial Sequence: Synthetic polypeptide"
QVQLQESGPGLVKPSETLSLTCTVSGVSLPDYGVSWIRQPPGKGLEWIGVIWGSETTYYNSSLKSRVTISKDNSKNQVSLKLSSVTAADTAVYYCAKHYYYGGSYAMDYWGQGTLVTVSSGGGGSGGGGSGGGGSGGGGSEIVMTQSPATLSLSPGERATLSCRASQDISKYLNWYQQKPGQAPRLLIYHTSRLHSGIPARFSGSGSGTDYTLTISSLQPEDFAVYFCQQGNTLPYTFGQGTKLEIK

SEQ ID NO: 106 - protein, 242 aa, Artificial Sequence
  source: /note="Description of Artificial Sequence: Synthetic polypeptide"
EIVMTQSPATLSLSPGERATLSCRASQDISKYLNWYQQKPGQAPRLLIYHTSRLHSGIPARFSGSGSGTDYTLTISSLQPEDFAVYFCQQGNTLPYTFGQGTKLEIKGGGGSGGGGSGGGGSQVQLQESGPGLVKPSETLSLTCTVSGVSLPDYGVSWIRQPPGKGLEWIGVIWGSETTYYNSSLKSRVTISKDNSKNQVSLKLSSVTAADTAVYYCAKHYYYGGSYAMDYWGQGTLVTVSS

SEQ ID NO: 107 - protein, 242 aa, Artificial Sequence
  source: /note="Description of Artificial Sequence: Synthetic polypeptide"
QVQLQESGPGLVKPSETLSLTCTVSGVSLPDYGVSWIRQPPGKGLEWIGVIWGSETTYYNSSLKSRVTISKDNSKNQVSLKLSSVTAADTAVYYCAKHYYYGGSYAMDYWGQGTLVTVSSGGGGSGGGGSGGGGSEIVMTQSPATLSLSPGERATLSCRASQDISKYLNWYQQKPGQAPRLLIYHTSRLHSGIPARFSGSGSGTDYTLTISSLQPEDFAVYFCQQGNTLPYTFGQGTKLEIK

SEQ ID NO: 108 - protein, 15 aa, Artificial Sequence
  source: /note="Description of Artificial Sequence: Synthetic peptide"
GHEAAAVMQVQYPAS

SEQ ID NO: 109 - protein, 15 aa, Artificial Sequence
  source: /note="Description of Artificial Sequence: Synthetic peptide"
GKGGSGKGGSGKGGS

SEQ ID NO: 110 - protein, 15 aa, Artificial Sequence
  source: /note="Description of Artificial Sequence: Synthetic peptide"
GKGKSGKGKSGKGKS

SEQ ID NO: 111 - protein, 20 aa, Artificial Sequence
  source: /note="Description of Artificial Sequence: Synthetic peptide"
GKGKSGKGKSGKGKSGKGKS

SEQ ID NO: 112 - protein, 15 aa, Artificial Sequence
  source: /note="Description of Artificial Sequence: Synthetic peptide"
GKPGSGKPGSGKPGS

SEQ ID NO: 113 - protein, 10 aa, Artificial Sequence
  source: /note="Description of Artificial Sequence: Synthetic peptide"
GVSLPDYGVS

SEQ ID NO: 114 - protein, 16 aa, Artificial Sequence
  source: /note="Description of Artificial Sequence: Synthetic peptide"
VIWGSETTYYNSALKS

SEQ ID NO: 115 - protein, 16 aa, Artificial Sequence
  source: /note="Description of Artificial Sequence: Synthetic peptide"
VIWGSETTYYSSSLKS

SEQ ID NO: 116 - protein, 16 aa, Artificial Sequence
  source: /note="Description of Artificial Sequence: Synthetic peptide"
VIWGSETTYYQSSLKS

SEQ ID NO: 117 - protein, 16 aa, Artificial Sequence
  source: /note="Description of Artificial Sequence: Synthetic peptide"
VIWGSETTYYNSSLKS

SEQ ID NO: 118 - protein, 12 aa, Artificial Sequence
  source: /note="Description of Artificial Sequence: Synthetic peptide"
HYYYGGSYAMDY

SEQ ID NO: 119 - protein, 11 aa, Artificial Sequence
  source: /note="Description of Artificial Sequence: Synthetic peptide"
RASQDISKYLN

SEQ ID NO: 120 - protein, 7 aa, Artificial Sequence
  source: /note="Description of Artificial Sequence: Synthetic peptide"
HTSRLHS

SEQ ID NO: 121 - protein, 9 aa, Artificial Sequence
  source: /note="Description of Artificial Sequence: Synthetic peptide"
QQGNTLPYT

SEQ ID NO: 122 - protein, 486 aa, Artificial Sequence
  source: /note="Description of Artificial Sequence: Synthetic polypeptide"
MALPVTALLLPLALLLHAARPEIVMTQSPATLSLSPGERATLSCRASQDISKYLNWYQQKPGQAPRLLIYHTSRLHSGIPARFSGSGSGTDYTLTISSLQPEDFAVYFCQQGNTLPYTFGQGTKLEIKGGGGSGGGGSGGGGSQVQLQESGPGLVKPSETLSLTCTVSGVSLPDYGVSWIRQPPGKGLEWIGVIWGSETTYYSSSLKSRVTISKDNSKNQVSLKLSSVTAADTAVYYCAKHYYYGGSYAMDYWGQGTLVTVSSTTTPAPRPPTPAPTIASQPLSLRPEACRPAAGGAVHTRGLDFACDIYIWAPLAGTCGVLLLSLVITLYCKRGRKKLLYIFKQPFMRPVQTTQEEDGCSCRFPEEEEGGCELRVKFSRSADAPAYKQGQNQLYNELNLGRREEYDVLDKRRGRDPEMGGKPRRKNPQEGLYNELQKDKMAEAYSEIGMKGERRRGKGHDGLYQGLSTATKDTYDALHMQALPPR

SEQ ID NO: 123 - protein, 486 aa, Artificial Sequence
  source: /note="Description of Artificial Sequence: Synthetic polypeptide"
MALPVTALLLPLALLLHAARPEIVMTQSPATLSLSPGERATLSCRASQDISKYLNWYQQKPGQAPRLLIYHTSRLHSGIPARFSGSGSGTDYTLTISSLQPEDFAVYFCQQGNTLPYTFGQGTKLEIKGGGGSGGGGSGGGGSQVQLQESGPGLVKPSETLSLTCTVSGVSLPDYGVSWIRQPPGKGLEWIGVIWGSETTYYQSSLKSRVTISKDNSKNQVSLKLSSVTAADTAVYYCAKHYYYGGSYAMDYWGQGTLVTVSSTTTPAPRPPTPAPTIASQPLSLRPEACRPAAGGAVHTRGLDFACDIYIWAPLAGTCGVLLLSLVITLYCKRGRKKLLYIFKQPFMRPVQTTQEEDGCSCRFPEEEEGGCELRVKFSRSADAPAYKQGQNQLYNELNLGRREEYDVLDKRRGRDPEMGGKPRRKNPQEGLYNELQKDKMAEAYSEIGMKGERRRGKGHDGLYQGLSTATKDTYDALHMQALPPR

SEQ ID NO: 124 - protein, 486 aa, Artificial Sequence
  source: /note="Description of Artificial Sequence: Synthetic polypeptide"
MALPVTALLLPLALLLHAARPQVQLQESGPGLVKPSETLSLTCTVSGVSLPDYGVSWIRQPPGKGLEWIGVIWGSETTYYSSSLKSRVTISKDNSKNQVSLKLSSVTAADTAVYYCAKHYYYGGSYAMDYWGQGTLVTVSSGGGGSGGGGSGGGGSEIVMTQSPATLSLSPGERATLSCRASQDISKYLNWYQQKPGQAPRLLIYHTSRLHSGIPARFSGSGSGTDYTLTISSLQPEDFAVYFCQQGNTLPYTFGQGTKLEIKTTTPAPRPPTPAPTIASQPLSLRPEACRPAAGGAVHTRGLDFACDIYIWAPLAGTCGVLLLSLVITLYCKRGRKKLLYIFKQPFMRPVQTTQEEDGCSCRFPEEEEGGCELRVKFSRSADAPAYKQGQNQLYNELNLGRREEYDVLDKRRGRDPEMGGKPRRKNPQEGLYNELQKDKMAEAYSEIGMKGERRRGKGHDGLYQGLSTATKDTYDALHMQALPPR

SEQ ID NO: 125 - protein, 486 aa, Artificial Sequence
  source: /note="Description of Artificial Sequence: Synthetic polypeptide"
MALPVTALLLPLALLLHAARPQVQLQESGPGLVKPSETLSLTCTVSGVSLPDYGVSWIRQPPGKGLEWIGVIWGSETTYYQSSLKSRVTISKDNSKNQVSLKLSSVTAADTAVYYCAKHYYYGGSYAMDYWGQGTLVTVSSGGGGSGGGGSGGGGSEIVMTQSPATLSLSPGERATLSCRASQDISKYLNWYQQKPGQAPRLLIYHTSRLHSGIPARFSGSGSGTDYTLTISSLQPEDFAVYFCQQGNTLPYTFGQGTKLEIKTTTPAPRPPTPAPTIASQPLSLRPEACRPAAGGAVHTRGLDFACDIYIWAPLAGTCGVLLLSLVITLYCKRGRKKLLYIFKQPFMRPVQTTQEEDGCSCRFPEEEEGGCELRVKFSRSADAPAYKQGQNQLYNELNLGRREEYDVLDKRRGRDPEMGGKPRRKNPQEGLYNELQKDKMAEAYSEIGMKGERRRGKGHDGLYQGLSTATKDTYDALHMQALPPR

SEQ ID NO: 126 - protein, 491 aa, Artificial Sequence
  source: /note="Description of Artificial Sequence: Synthetic polypeptide"
MALPVTALLLPLALLLHAARPEIVMTQSPATLSLSPGERATLSCRASQDISKYLNWYQQKPGQAPRLLIYHTSRLHSGIPARFSGSGSGTDYTLTISSLQPEDFAVYFCQQGNTLPYTFGQGTKLEIKGGGGSGGGGSGGGGSGGGGSQVQLQESGPGLVKPSETLSLTCTVSGVSLPDYGVSWIRQPPGKGLEWIGVIWGSETTYYSSSLKSRVTISKDNSKNQVSLKLSSVTAADTAVYYCAKHYYYGGSYAMDYWGQGTLVTVSSTTTPAPRPPTPAPTIASQPLSLRPEACRPAAGGAVHTRGLDFACDIYIWAPLAGTCGVLLLSLVITLYCKRGRKKLLYIFKQPFMRPVQTTQEEDGCSCRFPEEEEGGCELRVKFSRSADAPAYKQGQNQLYNELNLGRREEYDVLDKRRGRDPEMGGKPRRKNPQEGLYNELQKDKMAEAYSEIGMKGERRRGKGHDGLYQGLSTATKDTYDALHMQALPPR

SEQ ID NO: 127 - protein, 491 aa, Artificial Sequence
  source: /note="Description of Artificial Sequence: Synthetic polypeptide"
MALPVTALLLPLALLLHAARPEIVMTQSPATLSLSPGERATLSCRASQDISKYLNWYQQKPGQAPRLLIYHTSRLHSGIPARFSGSGSGTDYTLTISSLQPEDFAVYFCQQGNTLPYTFGQGTKLEIKGGGGSGGGGSGGGGSGGGGSQVQLQESGPGLVKPSETLSLTCTVSGVSLPDYGVSWIRQPPGKGLEWIGVIWGSETTYYQSSLKSRVTISKDNSKNQVSLKLSSVTAADTAVYYCAKHYYYGGSYAMDYWGQGTLVTVSSTTTPAPRPPTPAPTIASQPLSLRPEACRPAAGGAVHTRGLDFACDIYIWAPLAGTCGVLLLSLVITLYCKRGRKKLLYIFKQPFMRPVQTTQEEDGCSCRFPEEEEGGCELRVKFSRSADAPAYKQGQNQLYNELNLGRREEYDVLDKRRGRDPEMGGKPRRKNPQEGLYNELQKDKMAEAYSEIGMKGERRRGKGHDGLYQGLSTATKDTYDALHMQALPPR

SEQ ID NO: 128 - protein, 491 aa, Artificial Sequence
  source: /note="Description of Artificial Sequence: Synthetic polypeptide"
MALPVTALLLPLALLLHAARPQVQLQESGPGLVKPSETLSLTCTVSGVSLPDYGVSWIRQPPGKGLEWIGVIWGSETTYYSSSLKSRVTISKDNSKNQVSLKLSSVTAADTAVYYCAKHYYYGGSYAMDYWGQGTLVTVSSGGGGSGGGGSGGGGSGGGGSEIVMTQSPATLSLSPGERATLSCRASQDISKYLNWYQQKPGQAPRLLIYHTSRLHSGIPARFSGSGSGTDYTLTISSLQPEDFAVYFCQQGNTLPYTFGQGTKLEIKTTTPAPRPPTPAPTIASQPLSLRPEACRPAAGGAVHTRGLDFACDIYIWAPLAGTCGVLLLSLVITLYCKRGRKKLLYIFKQPFMRPVQTTQEEDGCSCRFPEEEEGGCELRVKFSRSADAPAYKQGQNQLYNELNLGRREEYDVLDKRRGRDPEMGGKPRRKNPQEGLYNELQKDKMAEAYSEIGMKGERRRGKGHDGLYQGLSTATKDTYDALHMQALPPR

SEQ ID NO: 129 - protein, 491 aa, Artificial Sequence
  source: /note="Description of Artificial Sequence: Synthetic polypeptide"
MALPVTALLLPLALLLHAARPQVQLQESGPGLVKPSETLSLTCTVSGVSLPDYGVSWIRQPPGKGLEWIGVIWGSETTYYQSSLKSRVTISKDNSKNQVSLKLSSVTAADTAVYYCAKHYYYGGSYAMDYWGQGTLVTVSSGGGGSGGGGSGGGGSGGGGSEIVMTQSPATLSLSPGERATLSCRASQDISKYLNWYQQKPGQAPRLLIYHTSRLHSGIPARFSGSGSGTDYTLTISSLQPEDFAVYFCQQGNTLPYTFGQGTKLEIKTTTPAPRPPTPAPTIASQPLSLRPEACRPAAGGAVHTRGLDFACDIYIWAPLAGTCGVLLLSLVITLYCKRGRKKLLYIFKQPFMRPVQTTQEEDGCSCRFPEEEEGGCELRVKFSRSADAPAYKQGQNQLYNELNLGRREEYDVLDKRRGRDPEMGGKPRRKNPQEGLYNELQKDKMAEAYSEIGMKGERRRGKGHDGLYQGLSTATKDTYDALHMQALPPR

SEQ ID NO: 130 - protein, 491 aa, Artificial Sequence
  source: /note="Description of Artificial Sequence: Synthetic polypeptide"
MALPVTALLLPLALLLHAARPEIVMTQSPATLSLSPGERATLSCRASQDISKYLNWYQQKPGQAPRLLIYHTSRLHSGIPARFSGSGSGTDYTLTISSLQPEDFAVYFCQQGNTLPYTFGQGTKLEIKGGGGSGGGGSGGGGSGGGGSQVQLQESGPGLVKPSETLSLTCTVSGVSLPDYGVSWIRQPPGKGLEWIGVIWGSETTYYNSSLKSRVTISKDNSKNQVSLKLSSVTAADTAVYYCAKHYYYGGSYAMDYWGQGTLVTVSSTTTPAPRPPTPAPTIASQPLSLRPEACRPAAGGAVHTRGLDFACDIYIWAPLAGTCGVLLLSLVITLYCKRGRKKLLYIFKQPFMRPVQTTQEEDGCSCRFPEEEEGGCELRVKFSRSADAPAYKQGQNQLYNELNLGRREEYDVLDKRRGRDPEMGGKPRRKNPQEGLYNELQKDKMAEAYSEIGMKGERRRGKGHDGLYQGLSTATKDTYDALHMQALPPR

SEQ ID NO: 131 - protein, 491 aa, Artificial Sequence; identical to SEQ ID NO: 130
  source: /note="Description of Artificial Sequence: Synthetic polypeptide"

SEQ ID NO: 132 - protein, 491 aa, Artificial Sequence
  source: /note="Description of Artificial Sequence: Synthetic polypeptide"
MALPVTALLLPLALLLHAARPQVQLQESGPGLVKPSETLSLTCTVSGVSLPDYGVSWIRQPPGKGLEWIGVIWGSETTYYNSSLKSRVTISKDNSKNQVSLKLSSVTAADTAVYYCAKHYYYGGSYAMDYWGQGTLVTVSSGGGGSGGGGSGGGGSGGGGSEIVMTQSPATLSLSPGERATLSCRASQDISKYLNWYQQKPGQAPRLLIYHTSRLHSGIPARFSGSGSGTDYTLTISSLQPEDFAVYFCQQGNTLPYTFGQGTKLEIKTTTPAPRPPTPAPTIASQPLSLRPEACRPAAGGAVHTRGLDFACDIYIWAPLAGTCGVLLLSLVITLYCKRGRKKLLYIFKQPFMRPVQTTQEEDGCSCRFPEEEEGGCELRVKFSRSADAPAYKQGQNQLYNELNLGRREEYDVLDKRRGRDPEMGGKPRRKNPQEGLYNELQKDKMAEAYSEIGMKGERRRGKGHDGLYQGLSTATKDTYDALHMQALPPR

SEQ ID NO: 133 - protein, 486 aa, Artificial Sequence
  source: /note="Description of Artificial Sequence: Synthetic polypeptide"
MALPVTALLLPLALLLHAARPEIVMTQSPATLSLSPGERATLSCRASQDISKYLNWYQQKPGQAPRLLIYHTSRLHSGIPARFSGSGSGTDYTLTISSLQPEDFAVYFCQQGNTLPYTFGQGTKLEIKGGGGSGGGGSGGGGSQVQLQESGPGLVKPSETLSLTCTVSGVSLPDYGVSWIRQPPGKGLEWIGVIWGSETTYYNSSLKSRVTISKDNSKNQVSLKLSSVTAADTAVYYCAKHYYYGGSYAMDYWGQGTLVTVSSTTTPAPRPPTPAPTIASQPLSLRPEACRPAAGGAVHTRGLDFACDIYIWAPLAGTCGVLLLSLVITLYCKRGRKKLLYIFKQPFMRPVQTTQEEDGCSCRFPEEEEGGCELRVKFSRSADAPAYKQGQNQLYNELNLGRREEYDVLDKRRGRDPEMGGKPRRKNPQEGLYNELQKDKMAEAYSEIGMKGERRRGKGHDGLYQGLSTATKDTYDALHMQALPPR

SEQ ID NO: 134 - protein, 19 aa, Artificial Sequence
  source: /note="Description of Artificial Sequence: Synthetic peptide"
GTAAAGAGAAGGAAAGAAG

SEQ ID NO: 135 - protein, 19 aa, Artificial Sequence
  source: /note="Description of Artificial Sequence: Synthetic peptide"
GTSGSSGSGSGGSGSGGGG

SEQ ID NO: 136-139 - skipped (4 entries)

SEQ ID NO: 140 - protein, 10 aa, Artificial Sequence
  source: /note="Description of Artificial Sequence: Synthetic peptide"
GGGGSGGGGS

SEQ ID NO: 141 - DNA, 30 bp, Artificial Sequence
  source: /note="Description of Artificial Sequence: Synthetic oligonucleotide"
ggtggcggaggttctggaggtggaggttcc

SEQ ID NO: 142-143 - skipped (2 entries)

SEQ ID NO: 144 - protein, 30 aa, Artificial Sequence
  source: /note="Description of Artificial Sequence: Synthetic polypeptide"
  SITE (1)..(30): /note="This sequence may encompass 1-6 'Gly Gly Gly Gly Ser' repeating units"
  source: /note="See specification as filed for detailed description of substitutions and preferred embodiments"
GGGGSGGGGSGGGGSGGGGSGGGGSGGGGS

SEQ ID NO: 145-147 - skipped (3 entries)

SEQ ID NO: 148 - protein, 486 aa, Artificial Sequence
  source: /note="Description of Artificial Sequence: Synthetic polypeptide"
MALPVTALLLPLALLLHAARPDIQMTQTTSSLSASLGDRVTISCRASQDISKYLNWYQQKPDGTVKLLIYHTSRLHSGVPSRFSGSGSGTDYSLTISNLEQEDIATYFCQQGNTLPYTFGGGTKLEITGGGGSGGGGSGGGGSEVKLQESGPGLVAPSQSLSVTCTVSGVSLPDYGVSWIRQPPRKGLEWLGVIWGSETTYYNSALKSRLTIIKDNSKSQVFLKMNSLQTDDTAIYYCAKHYYYGGSYAMDYWGQGTSVTVSSTTTPAPRPPTPAPTIASQPLSLRPEACRPAAGGAVHTRGLDFACDIYIWAPLAGTCGVLLLSLVITLYCKRGRKKLLYIFKQPFMRPVQTTQEEDGCSCRFPEEEEGGCELRVKFSRSADAPAYKQGQNQLYNELNLGRREEYDVLDKRRGRDPEMGGKPRRKNPQEGLYNELQKDKMAEAYSEIGMKGERRRGKGHDGLYQGLSTATKDTYDALHMQALPPR

SEQ ID NO: 149 - protein, 242 aa, Artificial Sequence
  source: /note="Description of Artificial Sequence: Synthetic polypeptide"
DIQMTQTTSSLSASLGDRVTISCRASQDISKYLNWYQQKPDGTVKLLIYHTSRLHSGVPSRFSGSGSGTDYSLTISNLEQEDIATYFCQQGNTLPYTFGGGTKLEITGGGGSGGGGSGGGGSEVKLQESGPGLVAPSQSLSVTCTVSGVSLPDYGVSWIRQPPRKGLEWLGVIWGSETTYYNSALKSRLTIIKDNSKSQVFLKMNSLQTDDTAIYYCAKHYYYGGSYAMDYWGQGTSVTVSS

SEQ ID NO: 150 - skipped

SEQ ID NO: 151 - DNA, 813 bp, Artificial Sequence
  source: /note="Description of Artificial Sequence: Synthetic polynucleotide"
atggccctccctgtcaccgccctgctgcttccgctggctcttctgctccacgccgctcggcccgaaattgtgatgacccagtcacccgccactcttagcctttcacccggtgagcgcgcaaccctgtcttgcagagcctcccaagacatctcaaaataccttaattggtatcaacagaagcccggacaggctcctcgccttctgatctaccacaccagccggctccattctggaatccctgccaggttcagcggtagcggatctgggaccgactacaccctcactatcagctcactgcagccagaggacttcgctgtctatttctgtcagcaagggaacaccctgccctacacctttggacagggcaccaagctcgagattaaaggtggaggtggcagcggaggaggtgggtccggcggtggaggaagccaggtccaactccaagaaagcggaccgggtcttgtgaagccatcagaaactctttcactgacttgtactgtgagcggagtgtctctccccgattacggggtgtcttggatcagacagccaccggggaagggtctggaatggattggagtgatttggggctctgagactacttactactcttcatccctcaagtcacgcgtcaccatctcaaaggacaactctaagaatcaggtgtcactgaaactgtcatctgtgaccgcagccgacaccgccgtgtactattgcgctaagcattactattatggcgggagctacgcaatggattactggggacagggtactctggtcaccgtgtccagccaccaccatcatcaccatcaccat

SEQ ID NO: 152 - DNA, 813 bp, Artificial Sequence
  source: /note="Description of Artificial Sequence: Synthetic polynucleotide"
atggccctccctgtcaccgccctgctgcttccgctggctcttctgctccacgccgctcggcccgaaattgtgatgacccagtcacccgccactcttagcctttcacccggtgagcgcgcaaccctgtcttgcagagcctcccaagacatctcaaaataccttaattggtatcaacagaagcccggacaggctcctcgccttctgatctaccacaccagccggctccattctggaatccctgccaggttcagcggtagcggatctgggaccgactacaccctcactatcagctcactgcagccagaggacttcgctgtctatttctgtcagcaagggaacaccctgccctacacctttggacagggcaccaagctcgagattaaaggtggaggtggcagcggaggaggtgggtccggcggtggaggaagccaggtccaactccaagaaagcggaccgggtcttgtgaagccatcagaaactctttcactgacttgtactgtgagcggagtgtctctccccgattacggggtgtcttggatcagacagccaccggggaagggtctggaatggattggagtgatttggggctctgagactacttactaccaatcatccctcaagtcacgcgtcaccatctcaaaggacaactctaagaatcaggtgtcactgaaactgtcatctgtgaccgcagccgacaccgccgtgtactattgcgctaagcattactattatggcgggagctacgcaatggattactggggacagggtactctggtcaccgtgtccagccaccaccatcatcaccatcaccat

SEQ ID NO: 153 - DNA, 813 bp, Artificial Sequence
  source: /note="Description of Artificial Sequence: Synthetic polynucleotide"
atggctctgcccgtgaccgcactcctcctgccactggctctgctgcttcacgccgctcgcccacaagtccagcttcaagaatcagggcctggtctggtgaagccatctgagactctgtccctcacttgcaccgtgagcggagtgtccctcccagactacggagtgagctggattagacagcctcccggaaagggactggagtggatcggagtgatttggggtagcgaaaccacttactattcatcttccctgaagtcacgggtcaccatttcaaaggataactcaaagaatcaagtgagcctcaagctctcatcagtcaccgccgctgacaccgccgtgtattactgtgccaagcattactactatggagggtcctacgccatggactactggggccagggaactctggtcactgtgtcatctggtggaggaggtagcggaggaggcgggagcggtggaggtggctccgaaatcgtgatgacccagagccctgcaaccctgtccctttctcccggggaacgggctaccctttcttgtcgggcatcacaagatatctcaaaatacctcaattggtatcaacagaagccgggacaggcccctaggcttcttatctaccacacctctcgcctgcatagcgggattcccgcacgctttagcgggtctggaagcgggaccgactacactctgaccatctcatctctccagcccgaggacttcgccgtctacttctgccagcagggtaacaccctgccgtacaccttcggccagggcaccaagcttgagatcaaacatcaccaccatcatcaccatcac

SEQ ID NO: 154 - DNA, 813 bp, Artificial Sequence
  source: /note="Description of Artificial Sequence: Synthetic polynucleotide"
atggctctgcccgtgaccgcactcctcctgccactggctctgctgcttcacgccgctcgcccacaagtccagcttcaagaatcagggcctggtctggtgaagccatctgagactctgtccctcacttgcaccgtgagcggagtgtccctcccagactacggagtgagctggattagacagcctcccggaaagggactggagtggatcggagtgatttggggtagcgaaaccacttactatcaatcttccctgaagtcacgggtcaccatttcaaaggataactcaaagaatcaagtgagcctcaagctctcatcagtcaccgccgctgacaccgccgtgtattactgtgccaagcattactactatggagggtcctacgccatggactactggggccagggaactctggtcactgtgtcatctggtggaggaggtagcggaggaggcgggagcggtggaggtggctccgaaatcgtgatgacccagagccctgcaaccctgtccctttctcccggggaacgggctaccctttcttgtcgggcatcacaagatatctcaaaatacctcaattggtatcaacagaagccgggacaggcccctaggcttcttatctaccacacctctcgcctgcatagcgggattcccgcacgctttagcgggtctggaagcgggaccgactacactctgaccatctcatctctccagcccgaggacttcgccgtctacttctgccagcagggtaacaccctgccgtacaccttcggccagggcaccaagcttgagatcaaacatcaccaccatcatcaccatcac

SEQ ID NO: 155 - DNA, 828 bp, Artificial Sequence
  source: /note="Description of Artificial Sequence: Synthetic polynucleotide"
atggccctcccagtgaccgctctgctgctgcctctcgcacttcttctccatgccgctcggcctgagatcgtcatgacccaaagccccgctaccctgtccctgtcacccggcgagagggcaaccctttcatgcagggccagccaggacatttctaagtacctcaactggtatcagcagaagccagggcaggctcctcgcctgctgatctaccacaccagccgcctccacagcggtatccccgccagattttccgggagcgggtctggaaccgactacaccctcaccatctcttctctgcagcccgaggatttcgccgtctatttctgccagcaggggaatactctgccgtacaccttcggtcaaggtaccaagctggaaatcaagggaggcggaggatcaggcggtggcggaagcggaggaggtggctccggaggaggaggttcccaagtgcagcttcaagaatcaggacccggacttgtgaagccatcagaaaccctctccctgacttgtaccgtgtccggtgtgagcctccccgactacggagtctcttggattcgccagcctccggggaagggtcttgaatggattggggtgatttggggatcagagactacttactactcttcatcacttaagtcacgggtcaccatcagcaaagataatagcaagaaccaagtgtcacttaagctgtcatctgtgaccgccgctgacaccgccgtgtactattgtgccaaacattactattacggagggtcttatgctatggactactggggacaggggaccctggtgactgtctctagccatcaccatcaccaccatcatcac

SEQ ID NO: 156 - DNA, 828 bp, Artificial Sequence
  source: /note="Description of Artificial Sequence: Synthetic polynucleotide"
atggccctcccagtgaccgctctgctgctgcctctcgcacttcttctccatgccgctcggcctgagatcgtcatgacccaaagccccgctaccctgtccctgtcacccggcgagagggcaaccctttcatgcagggccagccaggacatttctaagtacctcaactggtatcagcagaagccagggcaggctcctcgcctgctgatctaccacaccagccgcctccacagcggtatccccgccagattttccgggagcgggtctggaaccgactacaccctcaccatctcttctctgcagcccgaggatttcgccgtctatttctgccagcaggggaatactctgccgtacaccttcggtcaaggtaccaagctggaaatcaagggaggcggaggatcaggcggtggcggaagcggaggaggtggctccggaggaggaggttcccaagtgcagcttcaagaatcaggacccggacttgtgaagccatcagaaaccctctccctgacttgtaccgtgtccggtgtgagcctccccgactacggagtctcttggattcgccagcctccggggaagggtcttgaatggattggggtgatttggggatcagagactacttactaccagtcatcacttaagtcacgggtcaccatcagcaaagataatagcaagaaccaagtgtcacttaagctgtcatctgtgaccgccgctgacaccgccgtgtactattgtgccaaacattactattacggagggtcttatgctatggactactggggacaggggaccctggtgactgtctctagccatcaccatcaccaccatcatcac

SEQ ID NO: 157 - DNA, 828 bp, Artificial Sequence
  source: /note="Description of Artificial Sequence: Synthetic polynucleotide"
atggcactgcctgtcactgccctcctgctgcctctggccctccttctgcatgccgccaggccccaagtccagctgcaagagtcaggacccggactggtgaagccgtctgagactctctcactgacttgtaccgtcagcggcgtgtccctccccgactacggagtgtcatggatccgccaacctcccgggaaagggcttgaatggattggtgtcatctggggttctgaaaccacctactactcatcttccctgaagtccagggtgaccatcagcaaggataattccaagaaccaggtcagccttaagctgtcatctgtgaccgctgctgacaccgccgtgtattactgcgccaagcactactattacggaggaagctacgctatggactattggggacagggcactctcgtgactgtgagcagcggcggtggagggtctggaggtggaggatccggtggtggtgggtcaggcggaggagggagcgagattgtgatgactcagtcaccagccaccctttctctttcacccggcgagagagcaaccctgagctgtagagccagccaggacatttctaagtacctcaactggtatcagcaaaaaccggggcaggcccctcgcctcctgatctaccatacctcacgccttcactctggtatccccgctcggtttagcggatcaggatctggtaccgactacactctgaccatttccagcctgcagccagaagatttcgcagtgtatttctgccagcagggcaatacccttccttacaccttcggtcagggaaccaagctcgaaatcaagcaccatcaccatcatcaccaccat

SEQ ID NO: 158 - DNA, 828 bp, Artificial Sequence
  source: /note="Description of Artificial Sequence: Synthetic polynucleotide"
atggcactgcctgtcactgccctcctgctgcctctggccctccttctgcatgccgccaggccccaagtccagctgcaagagtcaggacccggactggtgaagccgtctgagactctctcactgacttgtaccgtcagcggcgtgtccctccccgactacggagtgtcatggatccgccaacctcccgggaaagggcttgaatggattggtgtcatctggggttctgaaaccacctactaccagtcttccctgaagtccagggtgaccatcagcaaggataattccaagaaccaggtcagccttaagctgtcatctgtgaccgctgctgacaccgccgtgtattactgcgccaagcactactattacggaggaagctacgctatggactattggggacagggcactctcgtgactgtgagcagcggcggtggagggtctggaggtggaggatccggtggtggtgggtcaggcggaggagggagcgagattgtgatgactcagtcaccagccaccctttctctttcacccggcgagagagcaaccctgagctgtagagccagccaggacatttctaagtacctcaactggtatcagcaaaaaccggggcaggcccctcgcctcctgatctaccatacctcacgccttcactctggtatccccgctcggtttagcggatcaggatctggtaccgactacactctgaccatttccagcctgcagccagaagatttcgcagtgtatttctgccagcagggcaatacccttccttacaccttcggtcagggaaccaagctcgaaatcaagcaccatcaccatcatcatcaccac

SEQ ID NO: 159 - DNA, 828 bp, Artificial Sequence
  source: /note="Description of Artificial Sequence: Synthetic polynucleotide"
atggccctcccagtgaccgctctgctgctgcctctcgcacttcttctccatgccgctcggcctgagatcgtcatgacccaaagccccgctaccctgtccctgtcacccggcgagagggcaaccctttcatgcagggccagccaggacatttctaagtacctcaactggtatcagcagaagccagggcaggctcctcgcctgctgatctaccacaccagccgcctccacagcggtatccccgccagattttccgggagcgggtctggaaccgactacaccctcaccatctcttctctgcagcccgaggatttcgccgtctatttctgccagcaggggaatactctgccgtacaccttcggtcaaggtaccaagctggaaatcaagggaggcggaggatcaggcggtggcggaagcggaggaggtggctccggaggaggaggttcccaagtgcagcttcaagaatcaggacccggacttgtgaagccatcagaaaccctctccctgacttgtaccgtgtccggtgtgagcctccccgactacggagtctcttggattcgccagcctccggggaagggtcttgaatggattggggtgatttggggatcagagactacttactacaattcatcacttaagtcacgggtcaccatcagcaaagataatagcaagaaccaagtgtcacttaagctgtcatctgtgaccgccgctgacaccgccgtgtactattgtgccaaacattactattacggagggtcttatgctatggactactggggacaggggaccctggtgactgtctctagccatcaccatcaccaccatcatcac

SEQ ID NO: 160 - DNA, 828 bp, Artificial Sequence
  source: /note="Description of Artificial Sequence: Synthetic polynucleotide"
atggcactgcctgtcactgccctcctgctgcctctggccctccttctgcatgccgccaggccccaagtccagctgcaagagtcaggacccggactggtgaagccgtctgagactctctcactgacttgtaccgtcagcggcgtgtccctccccgactacggagtgtcatggatccgccaacctcccgggaaagggcttgaatggattggtgtcatctggggttctgaaaccacctactacaactcttccctgaagtccagggtgaccatcagcaaggataattccaagaaccaggtcagccttaagctgtcatctgtgaccgctgctgacaccgccgtgtattactgcgccaagcactactattacggaggaagctacgctatggactattggggacagggcactctcgtgactgtgagcagcggcggtggagggtctggaggtggaggatccggtggtggtgggtcaggcggaggagggagcgagattgtgatgactcagtcaccagccaccctttctctttcacccggcgagagagcaaccctgagctgtagagccagccaggacatttctaagtacctcaactggtatcagcaaaaaccggggcaggcccctcgcctcctgatctaccatacctcacgccttcactctggtatccccgctcggtttagcggatcaggatctggtaccgactacactctgaccatttccagcctgcagccagaagatttcgcagtgtatttctgccagcagggcaatacccttccttacaccttcggtcagggaaccaagctcgaaatcaagcaccatcaccatcatcaccaccat

SEQ ID NO: 161 - DNA, 813 bp, Artificial Sequence
  source: /note="Description of Artificial Sequence: Synthetic polynucleotide"
atggccctccctgtcaccgccctgctgcttccgctggctcttctgctccacgccgctcggcccgaaattgtgatgacccagtcacccgccactcttagcctttcacccggtgagcgcgcaaccctgtcttgcagagcctcccaagacatctcaaaataccttaattggtatcaacagaagcccggacaggctcctcgccttctgatctaccacaccagccggctccattctggaatccctgccaggttcagcggtagcggatctgggaccgactacaccctcactatcagctcactgcagccagaggacttcgctgtctatttctgtcagcaagggaacaccctgccctacacctttggacagggcaccaagctcgagattaaaggtggaggtggcagcggaggaggtgggtccggcggtggaggaagccaggtccaactccaagaaagcggaccgggtcttgtgaagccatcagaaactctttcactgacttgtactgtgagcggagtgtctctccccgattacggggtgtcttggatcagacagccaccggggaagggtctggaatggattggagtgatttggggctctgagactacttactacaattcatccctcaagtcacgcgtcaccatctcaaaggacaactctaagaatcaggtgtcactgaaactgtcatctgtgaccgcagccgacaccgccgtgtactattgcgctaagcattactattatggcgggagctacgcaatggattactggggacagggtactctggtcaccgtgtccagccaccaccatcatcaccatcaccat

SEQ ID NO: 162 - DNA, 813 bp, Artificial Sequence
  source: /note="Description of Artificial Sequence: Synthetic polynucleotide"
atggctctgcccgtgaccgcactcctcctgccactggctctgctgcttcacgccgctcgcccacaagtccagcttcaagaatcagggcctggtctggtgaagccatctgagactctgtccctcacttgcaccgtgagcggagtgtccctcccagactacggagtgagctggattagacagcctcccggaaagggactggagtggatcggagtgatttggggtagcgaaaccacttactataactcttccctgaagtcacgggtcaccatttcaaaggataactcaaagaatcaagtgagcctcaagctctcatcagtcaccgccgctgacaccgccgtgtattactgtgccaagcattactactatggagggtcctacgccatggactactggggccagggaactctggtcactgtgtcatctggtggaggaggtagcggaggaggcgggagcggtggaggtggctccgaaatcgtgatgacccagagccctgcaaccctgtccctttctcccggggaacgggctaccctttcttgtcgggcatcacaagatatctcaaaatacctcaattggtatcaacagaagccgggacaggcccctaggcttcttatctaccacacctctcgcctgcatagcgggattcccgcacgctttagcgggtctggaagcgggaccgactacactctgaccatctcatctctccagcccgaggacttcgccgtctacttctgccagcagggtaacaccctgccgtacaccttcggccagggcaccaagcttgagatcaaacatcaccaccatcatcaccatcac

SEQ ID NO: 163 - protein, 271 aa, Artificial Sequence
  source: /note="Description of Artificial Sequence: Synthetic polypeptide"
MALPVTALLLPLALLLHAARPEIVMTQSPATLSLSPGERATLSCRASQDISKYLNWYQQKPGQAPRLLIYHTSRLHSGIPARFSGSGSGTDYTLTISSLQPEDFAVYFCQQGNTLPYTFGQGTKLEIKGGGGSGGGGSGGGGSQVQLQESGPGLVKPSETLSLTCTVSGVSLPDYGVSWIRQPPGKGLEWIGVIWGSETTYYSSSLKSRVTISKDNSKNQVSLKLSSVTAADTAVYYCAKHYYYGGSYAMDYWGQGTLVTVSSHHHHHHHH

SEQ ID NO: 164 - protein, 271 aa, Artificial Sequence
  source: /note="Description of Artificial Sequence: Synthetic polypeptide"
MALPVTALLLPLALLLHAARPEIVMTQSPATLSLSPGERATLSCRASQDISKYLNWYQQKPGQAPRLLIYHTSRLHSGIPARFSGSGSGTDYTLTISSLQPEDFAVYFCQQGNTLPYTFGQGTKLEIKGGGGSGGGGSGGGGSQVQLQESGPGLVKPSETLSLTCTVSGVSLPDYGVSWIRQPPGKGLEWIGVIWGSETTYYQSSLKSRVTISKDNSKNQVSLKLSSVTAADTAVYYCAKHYYYGGSYAMDYWGQGTLVTVSSHHHHHHHH

SEQ ID NO: 165 - protein, 271 aa, Artificial Sequence
  source: /note="Description of Artificial Sequence: Synthetic polypeptide"
MALPVTALLLPLALLLHAARPQVQLQESGPGLVKPSETLSLTCTVSGVSLPDYGVSWIRQPPGKGLEWIGVIWGSETTYYSSSLKSRVTISKDNSKNQVSLKLSSVTAADTAVYYCAKHYYYGGSYAMDYWGQGTLVTVSSGGGGSGGGGSGGGGSEIVMTQSPATLSLSPGERATLSCRASQDISKYLNWYQQKPGQAPRLLIYHTSRLHSGIPARFSGSGSGTDYTLTISSLQPEDFAVYFCQQGNTLPYTFGQGTKLEIKHHHHHHHH

SEQ ID NO: 166 - protein, 271 aa, Artificial Sequence
  source: /note="Description of Artificial Sequence: Synthetic polypeptide"
MALPVTALLLPLALLLHAARPQVQLQESGPGLVKPSETLSLTCTVSGVSLPDYGVSWIRQPPGKGLEWIGVIWGSETTYYQSSLKSRVTISKDNSKNQVSLKLSSVTAADTAVYYCAKHYYYGGSYAMDYWGQGTLVTVSSGGGGSGGGGSGGGGSEIVMTQSPATLSLSPGERATLSCRASQDISKYLNWYQQKPGQAPRLLIYHTSRLHSGIPARFSGSGSGTDYTLTISSLQPEDFAVYFCQQGNTLPYTFGQGTKLEIKHHHHHHHH

SEQ ID NO: 167 - protein, 276 aa, Artificial Sequence
  source: /note="Description of Artificial Sequence: Synthetic polypeptide"
MALPVTALLLPLALLLHAARPEIVMTQSPATLSLSPGERATLSCRASQDISKYLNWYQQKPGQAPRLLIYHTSRLHSGIPARFSGSGSGTDYTLTISSLQPEDFAVYFCQQGNTLPYTFGQGTKLEIKGGGGSGGGGSGGGGSGGGGSQVQLQESGPGLVKPSETLSLTCTVSGVSLPDYGVSWIRQPPGKGLEWIGVIWGSETTYYSSSLKSRVTISKDNSKNQVSLKLSSVTAADTAVYYCAKHYYYGGSYAMDYWGQGTLVTVSSHHHHHHHH

SEQ ID NO: 168 - protein, 276 aa, Artificial Sequence
  source: /note="Description of Artificial Sequence: Synthetic polypeptide"
MALPVTALLLPLALLLHAARPEIVMTQSPATLSLSPGERATLSCRASQDISKYLNWYQQKPGQAPRLLIYHTSRLHSGIPARFSGSGSGTDYTLTISSLQPEDFAVYFCQQGNTLPYTFGQGTKLEIKGGGGSGGGGSGGGGSGGGGSQVQLQESGPGLVKPSETLSLTCTVSGVSLPDYGVSWIRQPPGKGLEWIGVIWGSETTYYQSSLKSRVTISKDNSKNQVSLKLSSVTAADTAVYYCAKHYYYGGSYAMDYWGQGTLVTVSSHHHHHHHH

SEQ ID NO: 169 - protein, 276 aa, Artificial Sequence
  source: /note="Description of Artificial Sequence: Synthetic polypeptide"
MALPVTALLLPLALLLHAARPQVQLQESGPGLVKPSETLSLTCTVSGVSLPDYGVSWIRQPPGKGLEWIGVIWGSETTYYSSSLKSRVTISKDNSKNQVSLKLSSVTAADTAVYYCAKHYYYGGSYAMDYWGQGTLVTVSSGGGGSGGGGSGGGGSGGGGSEIVMTQSPATLSLSPGERATLSCRASQDISKYLNWYQQKPGQAPRLLIYHTSRLHSGIPARFSGSGSGTDYTLTISSLQPEDFAVYFCQQGNTLPYTFGQGTKLEIKHHHHHHHH

SEQ ID NO: 170 - protein, 276 aa, Artificial Sequence
  source: /note="Description of Artificial Sequence: Synthetic polypeptide"
MALPVTALLLPLALLLHAARPQVQLQESGPGLVKPSETLSLTCTVSGVSLPDYGVSWIRQPPGKGLEWIGVIWGSETTYYQSSLKSRVTISKDNSKNQVSLKLSSVTAADTAVYYCAKHYYYGGSYAMDYWGQGTLVTVSSGGGGSGGGGSGGGGSGGGGSEIVMTQSPATLSLSPGERATLSCRASQDISKYLNWYQQKPGQAPRLLIYHTSRLHSGIPARFSGSGSGTDYTLTISSLQPEDFAVYFCQQGNTLPYTFGQGTKLEIKHHHHHHHH

SEQ ID NO: 171 - protein, 276 aa, Artificial Sequence
  source: /note="Description of Artificial Sequence: Synthetic polypeptide"
MALPVTALLLPLALLLHAARPEIVMTQSPATLSLSPGERATLSCRASQDISKYLNWYQQKPGQAPRLLIYHTSRLHSGIPARFSGSGSGTDYTLTISSLQPEDFAVYFCQQGNTLPYTFGQGTKLEIKGGGGSGGGGSGGGGSGGGGSQVQLQESGPGLVKPSETLSLTCTVSGVSLPDYGVSWIRQPPGKGLEWIGVIWGSETTYYNSSLKSRVTISKDNSKNQVSLKLSSVTAADTAVYYCAKHYYYGGSYAMDYWGQGTLVTVSSHHHHHHHH

SEQ ID NO: 172 - protein, 276 aa, Artificial Sequence
  source: /note="Description of Artificial Sequence: Synthetic polypeptide"
MALPVTALLLPLALLLHAARPQVQLQESGPGLVKPSETLSLTCTVSGVSLPDYGVSWIRQPPGKGLEWIGVIWGSETTYYNSSLKSRVTISKDNSKNQVSLKLSSVTAADTAVYYCAKHYYYGGSYAMDYWGQGTLVTVSSGGGGSGGGGSGGGGSGGGGSEIVMTQSPATLSLSPGERATLSCRASQDISKYLNWYQQKPGQAPRLLIYHTSRLHSGIPARFSGSGSGTDYTLTISSLQPEDFAVYFCQQGNTLPYTFGQGTKLEIKHHHHHHHH

SEQ ID NO: 173 - protein, 271 aa, Artificial Sequence
  source: /note="Description of Artificial Sequence: Synthetic polypeptide"
MALPVTALLLPLALLLHAARPEIVMTQSPATLSLSPGERATLSCRASQDISKYLNWYQQKPGQAPRLLIYHTSRLHSGIPARFSGSGSGTDYTLTISSLQPEDFAVYFCQQGNTLPYTFGQGTKLEIKGGGGSGGGGSGGGGSQVQLQESGPGLVKPSETLSLTCTVSGVSLPDYGVSWIRQPPGKGLEWIGVIWGSETTYYNSSLKSRVTISKDNSKNQVSLKLSSVTAADTAVYYCAKHYYYGGSYAMDYWGQGTLVTVSSHHHHHHHH

SEQ ID NO: 174 - protein, 271 aa, Artificial Sequence
  source: /note="Description of Artificial Sequence: Synthetic polypeptide"
MALPVTALLLPLALLLHAARPQVQLQESGPGLVKPSETLSLTCTVSGVSLPDYGVSWIRQPPGKGLEWIGVIWGSETTYYNSSLKSRVTISKDNSKNQVSLKLSSVTAADTAVYYCAKHYYYGGSYAMDYWGQGTLVTVSSGGGGSGGGGSGGGGSEIVMTQSPATLSLSPGERATLSCRASQDISKYLNWYQQKPGQAPRLLIYHTSRLHSGIPARFSGSGSGTDYTLTISSLQPEDFAVYFCQQGNTLPYTFGQGTKLEIKHHHHHHHH

SEQ ID NO: 175 - DNA, 1458 bp, Artificial Sequence
  source: /note="Description of Artificial Sequence: Synthetic polynucleotide"
atggccctccctgtcaccgccctgctgcttccgctggctcttctgctccacgccgctcggcccgaaattgtgatgacccagtcacccgccactcttagcctttcacccggtgagcgcgcaaccctgtcttgcagagcctcccaagacatctcaaaataccttaattggtatcaacagaagcccggacaggctcctcgccttctgatctaccacaccagccggctccattctggaatccctgccaggttcagcggtagcggatctgggaccgactacaccctcactatcagctcactgcagccagaggacttcgctgtctatttctgtcagcaagggaacaccctgccctacacctttggacagggcaccaagctcgagattaaaggtggaggtggcagcggaggaggtgggtccggcggtggaggaagccaggtccaactccaagaaagcggaccgggtcttgtgaagccatcagaaactctttcactgacttgtactgtgagcggagtgtctctccccgattacggggtgtcttggatcagacagccaccggggaagggtctggaatggattggagtgatttggggctctgagactacttactactcttcatccctcaagtcacgcgtcaccatctcaaaggacaactctaagaatcaggtgtcactgaaactgtcatctgtgaccgcagccgacaccgccgtgtactattgcgctaagcattactattatggcgggagctacgcaatggattactggggacagggtactctggtcaccgtgtccagcaccactaccccagcaccgaggccacccaccccggctcctaccatcgcctcccagcctctgtccctgcgtccggaggcatgtagacccgcagctggtggggccgtgcatacccggggtcttgacttcgcctgcgatatctacatttgggcccctctggctggtacttgcggggtcctgctgctttcactcgtgatcactctttactgtaagcgcggtcggaagaagctgctgtacatctttaagcaacccttcatgaggcctgtgcagactactcaagaggaggacggctgttcatgccggttcccagaggaggaggaaggcggctgcgaactgcgcgtgaaattcagccgcagcgcagatgctccagcctacaagcaggggcagaaccagctctacaacgaactcaatcttggtcggagagaggagtacgacgtgctggacaagcggagaggacgggacccagaaatgggcgggaagccgcgcagaaagaatccccaagagggcctgtacaacgagctccaaaaggataagatggcagaagcctatagcgagattggtatgaaaggggaacgcagaagaggcaaaggccacgacggactgtaccagggactcagcaccgccaccaaggacacctatgacgctcttcacatgcaggccctgccgcctcgg

SEQ ID NO: 176 - DNA, 1458 bp, Artificial Sequence
  source: /note="Description of Artificial Sequence: Synthetic polynucleotide"
atggccctccctgtcaccgccctgctgcttccgctggctcttctgctccacgccgctcggcccgaaattgtgatgacccagtcacccgccactcttagcctttcacccggtgagcgcgcaaccctgtcttgcagagcctcccaagacatctcaaaataccttaattggtatcaacagaagcccggacaggctcctcgccttctgatctaccacaccagccggctccattctggaatccctgccaggttcagcggtagcggatctgggaccgactacaccctcactatcagctcactgcagccagaggacttcgctgtctatttctgtcagcaagggaacaccctgccctacacctttggacagggcaccaagctcgagattaaaggtggaggtggcagcggaggaggtgggtccggcggtggaggaagccaggtccaactccaagaaagcggaccgggtcttgtgaagccatcagaaactctttcactgacttgtactgtgagcggagtgtctctccccgattacggggtgtcttggatcagacagccaccggggaagggtctggaatggattggagtgatttggggctctgagactacttactaccaatcatccctcaagtcacgcgtcaccatctcaaaggacaactctaagaatcaggtgtcactgaaactgtcatctgtgaccgcagccgacaccgccgtgtactattgcgctaagcattactattatggcgggagctacgcaatggattactggggacagggtactctggtcaccgtgtccagcaccactaccccagcaccgaggccacccaccccggctcctaccatcgcctcccagcctctgtccctgcgtccggaggcatgtagacccgcagctggtggggccgtgcatacccggggtcttgacttcgcctgcgatatctacatttgggcccctctggctggtacttgcggggtcctgctgctttcactcgtgatcactctttactgtaagcgcggtcggaagaagctgctgtacatctttaagcaacccttcatgaggcctgtgcagactactcaagaggaggacggctgttcatgccggttcccagaggaggaggaaggcggctgcgaactgcgcgtgaaattcagccgcagcgcagatgctccagcctacaagcaggggcagaaccagctctacaacgaactcaatcttggtcggagagaggagtacgacgtgctggacaagcggagaggacgggacccagaaatgggcgggaagccgcgcagaaagaatccccaagagggcctgtacaacgagctccaaaaggataagatggcagaagcctatagcgagattggtatgaaaggggaacgcagaagaggcaaaggccacgacggactgtaccagggactcagcaccgccaccaaggacacctatgacgctcttcacatgcaggccctgccgcctcgg

SEQ ID NO: 177 - DNA, 1458 bp, Artificial Sequence
  source: /note="Description of Artificial Sequence: Synthetic polynucleotide"
atggctctgcccgtgaccgcactcctcctgccactggctctgctgcttcacgccgctcgcccacaagtccagcttcaagaatcagggcctggtctggtgaagccatctgagactctgtccctcacttgcaccgtgagcggagtgtccctcccagactacggagtgagctggattagacagcctcccggaaagggactggagtggatcggagtgatttggggtagcgaaaccacttactattcatcttccctgaagtcacgggtcaccatttcaaaggataactcaaagaatcaagtgagcctcaagctctcatcagtcaccgccgctgacaccgccgtgtattactgtgccaagcattactactatggagggtcctacgccatggactactggggccagggaactctggtcactgtgtcatctggtggaggaggtagcggaggaggcgggagcggtggaggtggctccgaaatcgtgatgacccagagccctgcaaccctgtccctttctcccggggaacgggctaccctttcttgtcgggcatcacaagatatctcaaaatacctcaattggtatcaacagaagccgggacaggcccctaggcttcttatctaccacacctctcgcctgcatagcgggattcccgcacgctttagcgggtctggaagcgggaccgactacactctgaccatctcatctctccagcccgaggacttcgccgtctacttctgccagcagggtaacaccctgccgtacaccttcggccagggcaccaagcttgagatcaaaaccactactcccgctccaaggccacccacccctgccccgaccatcgcctctcagccgctttccctgcgtccggaggcatgtagacccgcagctggtggggccgtgcatacccggggtcttgacttcgcctgcgatatctacatttgggcccctctggctggtacttgcggggtcctgctgctttcactcgtgatcactctttactgtaagcgcggtcggaagaagctgctgtacatctttaagcaacccttcatgaggcctgtgcagactactcaagaggaggacggctgttcatgccggttcccagaggaggaggaaggcggctgcgaactgcgcgtgaaattcagccgcagcgcagatgctccagcctacaagcaggggcagaaccagctctacaacgaactcaatcttggtcggagagaggagtacgacgtgctggacaagcggagaggacgggacccagaaatgggcgggaagccgcgcagaaagaatccccaagagggcctgtacaacgagctccaaaaggataagatggcagaagcctatagcgagattggtatgaaaggggaacgcagaagaggcaaaggccacgacggactgtaccagggactcagcaccgccaccaaggacacctatgacgctcttcacatgcaggccctgccgcctcgg

SEQ ID NO: 178 - DNA, 1458 bp, Artificial Sequence
  source: /note="Description of Artificial Sequence: Synthetic polynucleotide"
atggctctgcccgtgaccgcactcctcctgccactggctctgctgcttcacgccgctcgcccacaagtccagcttcaagaatcagggcctggtctggtgaagccatctgagactctgtccctcacttgcaccgtgagcggagtgtccctcccagactacggagtgagctggattagacagcctcccggaaagggactggagtggatcggagtgatttggggtagcgaaaccacttactatcaatcttccctgaagtcacgggtcaccatttcaaaggataactcaaagaatcaagtgagcctcaagctctcatcagtcaccgccgctgacaccgccgtgtattactgtgccaagcattactactatggagggtcctacgccatggactactggggccagggaactctggtcactgtgtcatctggtggaggaggtagcggaggaggcgggagcggtggaggtggctccgaaatcgtgatgacccagagccctgcaaccctgtccctttctcccggggaacgggctaccctttcttgtcgggcatcacaagatatctcaaaatacctcaattggtatcaacagaagccgggacaggcccctaggcttcttatctaccacacctctcgcctgcatagcgggattcccgcacgctttagcgggtctggaagcgggaccgactacactctgaccatctcatctctccagcccgaggacttcgccgtctacttctgccagcagggtaacaccctgccgtacaccttcggccagggcaccaagcttgagatcaaaaccactactcccgctccaaggccacccacccctgccccgaccatcgcctctcagccgctttccctgcgtccggaggcatgtagacccgcagctggtggggccgtgcatacccggggtcttgacttcgcctgcgatatctacatttgggcccctctggctggtacttgcggggtcctgctgctttcactcgtgatcactctttactgtaagcgcggtcggaagaagctgctgtacatctttaagcaacccttcatgaggcctgtgcagactactcaagaggaggacggctgttcatgccggttcccagaggaggaggaaggcggctgcgaactgcgcgtgaaattcagccgcagcgcagatgctccagcctacaagcaggggcagaaccagctctacaacgaactcaatcttggtcggagagaggagtacgacgtgctggacaagcggagaggacgggacccagaaatgggcgggaagccgcgcagaaagaatccccaagagggcctgtacaacgagctccaaaaggataagatggcagaagcctatagcgagattggtatgaaaggggaacgcagaagaggcaaaggccacgacggactgtaccagggactcagcaccgccaccaaggacacctatgacgctcttcacatgcaggccctgccgcctcgg

SEQ ID NO: 179 - DNA, 1473 bp, Artificial Sequence
  source: /note="Description of Artificial Sequence: Synthetic polynucleotide"
atggccctccctgtcaccgccctgctgcttccgctggctcttctgctccacgccgctcggcccgaaattgtgatgacccagtcacccgccactcttagcctttcacccggtgagcgcgcaaccctgtcttgcagagcctcccaagacatctcaaaataccttaattggtatcaacagaagcccggacaggctcctcgccttctgatctaccacaccagccggctccattctggaatccctgccaggttcagcggtagcggatctgggaccgactacaccctcactatcagctcactgcagccagaggacttcgctgtctatttctgtcagcaagggaacaccctgccctacacctttggacagggcaccaagctcgagattaaaggtggaggtggcagcggaggaggtgggtccggcggtggaggaagcggcggaggcgggagccaggtccaactccaagaaagcggaccgggtcttgtgaagccatcagaaactctttcactgacttgtactgtgagcggagtgtctctccccgattacggggtgtcttggatcagacagccaccggggaagggtctggaatggattggagtgatttggggctctgagactacttactactcttcatccctcaagtcacgcgtcaccatctcaaaggacaactctaagaatcaggtgtcactgaaactgtcatctgtgaccgcagccgacaccgccgtgtactattgcgctaagcattactattatggcgggagctacgcaatggattactggggacagggtactctggtcaccgtgtccagcaccactaccccagcaccgaggccacccaccccggctcctaccatcgcctcccagcctctgtccctgcgtccggaggcatgtagacccgcagctggtggggccgtgcatacccggggtcttgacttcgcctgcgatatctacatttgggcccctctggctggtacttgcggggtcctgctgctttcactcgtgatcactctttactgtaagcgcggtcggaagaagctgctgtacatctttaagcaacccttcatgaggcctgtgcagactactcaagaggaggacggctgttcatgccggttcccagaggaggaggaaggcggctgcgaactgcgcgtgaaattcagccgcagcgcagatgctccagcctacaagcaggggcagaaccagctctacaacgaactcaatcttggtcggagagaggagtacgacgtgctggacaagcggagaggacgggacccagaaatgggcgggaagccgcgcagaaagaatccccaagagggcctgtacaacgagctccaaaaggataagatggcagaagcctatagcgagattggtatgaaaggggaacgcagaagaggcaaaggccacgacggactgtaccagggactcagcaccgccaccaaggacacctatgacgctcttcacatgcaggccctgccgcctcgg

SEQ ID NO: 180 - DNA, 1473 bp, Artificial Sequence
  source: /note="Description of Artificial Sequence: Synthetic polynucleotide"
atggccctccctgtcaccgccctgctgcttccgctggctcttctgctccacgccgctcggcccgaaattgtgatgacccagtcacccgccactcttagcctttcacccggtgagcgcgcaaccctgtcttgcagagcctcccaagacatctcaaaataccttaattggtatcaacagaagcccggacaggctcctcgccttctgatctaccacaccagccggctccattctggaatccctgccaggttcagcggtagcggatctgggaccgactacaccctcactatcagctcactgcagccagaggacttcgctgtctatttctgtcagcaagggaacaccctgccctacacctttggacagggcaccaagctcgagattaaaggtggaggtggcagcggaggaggtgggtccggcggtggaggaagcggaggcggagggagccaggtccaactccaagaaagcggaccgggtcttgtgaagccatcagaaactctttcactgacttgtactgtgagcggagtgtctctccccgattacggggtgtcttggatcagacagccaccggggaagggtctggaatggattggagtgatttggggctctgagactacttactaccaatcatccctcaagtcacgcgtcaccatctcaaaggacaactctaagaatcaggtgtcactgaaactgtcatctgtgaccgcagccgacaccgccgtgtactattgcgctaagcattactattatggcgggagctacgcaatggattactggggacagggtactctggtcaccgtgtccagcaccactaccccagcaccgaggccacccaccccggctcctaccatcgcctcccagcctctgtccctgcgtccggaggcatgtagacccgcagctggtggggccgtgcatacccggggtcttgacttcgcctgcgatatctacatttgggcccctctggctggtacttgcggggtcctgctgctttcactcgtgatcactctttactgtaagcgcggtcggaagaagctgctgtacatctttaagcaacccttcatgaggcctgtgcagactactcaagaggaggacggctgttcatgccggttcccagaggaggaggaaggcggctgcgaactgcgcgtgaaattcagccgcagcgcagatgctccagcctacaagcaggggcagaaccagctctacaacgaactcaatcttggtcggagagaggagtacgacgtgctggacaagcggagaggacgggacccagaaatgggcgggaagccgcgcagaaagaatccccaagagggcctgtacaacgagctccaaaaggataagatggcagaagcctatagcgagattggtatgaaaggggaacgcagaagaggcaaaggccacgacggactgtaccagggactcagcaccgccaccaaggacacctatgacgctcttcacatgcaggccctgccgcctcgg

SEQ ID NO: 181 - DNA, 1473 bp, Artificial Sequence
  source: /note="Description of Artificial Sequence: Synthetic polynucleotide"
atggctctgcccgtgaccgcactcctcctgccactggctctgctgcttcacgccgctcgcccacaagtccagcttcaagaatcagggcctggtctggtgaagccatctgagactctgtccctcacttgcaccgtgagcggagtgtccctcccagactacggagtgagctggattagacagcctcccggaaagggactggagtggatcggagtgatttggggtagcgaaaccacttactattcatcttccctgaagtcacgggtcaccatttcaaaggataactcaaagaatcaagtgagcctcaagctctcatcagtcaccgccgctgacaccgccgtgtattactgtgccaagcattactactatggagggtcctacgccatggactactggggccagggaactctggtcactgtgtcatctggtggaggaggtagcggaggaggcgggagcggtggaggtggctccggaggtggcggaagcgaaatcgtgatgacccagagccctgcaaccctgtccctttctcccggggaacgggctaccctttcttgtcgggcatcacaagatatctcaaaatacctcaattggtatcaacagaagccgggacaggcccctaggcttcttatctaccacacctctcgcctgcatagcgggattcccgcacgctttagcgggtctggaagcgggaccgactacactctgaccatctcatctctccagcccgaggacttcgccgtctacttctgccagcagggtaacaccctgccgtacaccttcggccagggcaccaagcttgagatcaaaaccactactcccgctccaaggccacccacccctgccccgaccatcgcctctcagccgctttccctgcgtccggaggcatgtagacccgcagctggtggggccgtgcatacccggggtcttgacttcgcctgcgatatctacatttgggcccctctggctggtacttgcggggtcctgctgctttcactcgtgatcactctttactgtaagcgcggtcggaagaagctgctgtacatctttaagcaacccttcatgaggcctgtgcagactactcaagaggaggacggctgttcatgccggttcccagaggaggaggaaggcggctgcgaactgcgcgtgaaattcagccgcagcgcagatgctccagcctacaagcaggggcagaaccagctctacaacgaactcaatcttggtcggagagaggagtacgacgtgctggacaagcggagaggacgggacccagaaatgggcgggaagccgcgcagaaagaatccccaagagggcctgtacaacgagctccaaaaggataagatggcagaagcctatagcgagattggtatgaaaggggaacgcagaagaggcaaaggccacgacggactgtaccagggactcagcaccgccaccaaggacacctatgacgctcttcacatgcaggccctgccgcctcgg

SEQ ID NO: 182 - DNA, 1473 bp, Artificial Sequence
  source: /note="Description of Artificial Sequence: Synthetic polynucleotide"
atggctctgcccgtgaccgcactcctcctgccactggctctgctgcttcacgccgctcgcccacaagtccagcttcaagaatcagggcctggtctggtgaagccatctgagactctgtccctcacttgcaccgtgagcggagtgtccctcccagactacggagtgagctggattagacagcctcccggaaagggactggagtggatcggagtgatttggggtagcgaaaccacttactatcaatcttccctgaagtcacgggtcaccatttcaaaggataactcaaagaatcaagtgagcctcaagctctcatcagtcaccgccgctgacaccgccgtgtattactgtgccaagcattactactatggagggtcctacgccatggactactggggccagggaactctggtcactgtgtcatctggtggaggaggtagcggaggaggcgggagcggtggaggtggctccggaggcggtgggtcagaaatcgtgatgacccagagccctgcaaccctgtccctttctcccggggaacgggctaccctttcttgtcgggcatcacaagatatctcaaaatacctcaattggtatcaacagaagccgggacaggcccctaggcttcttatctaccacacctctcgcctgcatagcgggattcccgcacgctttagcgggtctggaagcgggaccgactacactctgaccatctcatctctccagcccgaggacttcgccgtctacttctgccagcagggtaacaccctgccgtacaccttcggccagggcaccaagcttgagatcaaaaccactactcccgctccaaggccacccacccctgccccgaccatcgcctctcagccgctttccctgcgtccggaggcatgtagacccgcagctggtggggccgtgcatacccggggtcttgacttcgcctgcgatatctacatttgggcccctctggctggtacttgcggggtcctgctgctttcactcgtgatcactctttactgtaagcgcggtcggaagaagctgctgtacatctttaagcaacccttcatgaggcctgtgcagactactcaagaggaggacggctgttcatgccggttcccagaggaggaggaaggcggctgcgaactgcgcgtgaaattcagccgcagcgcagatgctccagcctacaagcaggggcagaaccagctctacaacgaactcaatcttggtcggagagaggagtacgacgtgctggacaagcggagaggacgggacccagaaatgggcgggaagccgcgcagaaagaatccccaagagggcctgtacaacgagctccaaaaggataagatggcagaagcctatagcgagattggtatgaaaggggaacgcagaagaggcaaaggccacgacggactgtaccagggactcagcaccgccaccaaggacacctatgacgctcttcacatgcaggccctgccgcctcgg

SEQ ID NO: 183 - DNA, 1473 bp, Artificial Sequence
  source: /note="Description of Artificial Sequence: Synthetic polynucleotide"
atggccctccctgtcaccgccctgctgcttccgctggctcttctgctccacgccgctcggcccgaaattgtgatgacccagtcacccgccactcttagcctttcacccggtgagcgcgcaaccctgtcttgcagagcctcccaagacatctcaaaataccttaattggtatcaacagaagcccggacaggctcctcgccttctgatctaccacaccagccggctccattctggaatccctgccaggttcagcggtagcggatctgggaccgactacaccctcactatcagctcactgcagccagaggacttcgctgtctatttctgtcagcaagggaacaccctgccctacacctttggacagggcaccaagctcgagattaaaggtggaggtggcagcggaggaggtgggtccggcggtggaggaagcggaggcggtgggagccaggtccaactccaagaaagcggaccgggtcttgtgaagccatcagaaactctttcactgacttgtactgtgagcggagtgtctctccccgattacggggtgtcttggatcagacagccaccggggaagggtctggaatggattggagtgatttggggctctgagactacttactacaactcatccctcaagtcacgcgtcaccatctcaaaggacaactctaagaatcaggtgtcactgaaactgtcatctgtgaccgcagccgacaccgccgtgtactattgcgctaagcattactattatggcgggagctacgcaatggattactggggacagggtactctggtcaccgtgtccagcaccactaccccagcaccgaggccacccaccccggctcctaccatcgcctcccagcctctgtccctgcgtccggaggcatgtagacccgcagctggtggggccgtgcatacccggggtcttgacttcgcctgcgatatctacatttgggcccctctggctggtacttgcggggtcctgctgctttcactcgtgatcactctttactgtaagcgcggtcggaagaagctgctgtacatctttaagcaacccttcatgaggcctgtgcagactactcaagaggaggacggctgttcatgccggttcccagaggaggaggaaggcggctgcgaactgcgcgtgaaattcagccgcagcgcagatgctccagcctacaagcaggggcagaaccagctctacaacgaactcaatcttggtcggagagaggagtacgacgtgctggacaagcggagaggacgggacccagaaatgggcgggaagccgcgcagaaagaatccccaagagggcctgtacaacgagctccaaaaggataagatggcagaagcctatagcgagattggtatgaaaggggaacgcagaagaggcaaaggccacgacggactgtaccagggactcagcaccgccaccaaggacacctatgacgctcttcacatgcaggccctgccgcctcgg

SEQ ID NO: 184 - DNA, 1473 bp, Artificial Sequence; identical to SEQ ID NO: 183
  source: /note="Description of Artificial Sequence: Synthetic polynucleotide"

SEQ ID NO: 185 - DNA, 1473 bp, Artificial Sequence
  source: /note="Description of Artificial Sequence: Synthetic polynucleotide"
atggctctgcccgtgaccgcactcctcctgccactggctctgctgcttcacgccgctcgcccacaagtccagcttcaagaatcagggcctggtctggtgaagccatctgagactctgtccctcacttgcaccgtgagcggagtgtccctcccagactacggagtgagctggattagacagcctcccggaaagggactggagtggatcggagtgatttggggtagcgaaaccacttactataactcttccctgaagtcacgggtcaccatttcaaaggataactcaaagaatcaagtgagcctcaagctctcatcagtcaccgccgctgacaccgccgtgtattactgtgccaagcattactactatggagggtcctacgccatggactactggggccagggaactctggtcactgtgtcatctggtggaggaggtagcggaggaggcgggagcggtggaggtggctccggaggtggcggaagcgaaatcgtgatgacccagagccctgcaaccctgtccctttctcccggggaacgggctaccctttcttgtcgggcatcacaagatatctcaaaatacctcaattggtatcaacagaagccgggacaggcccctaggcttcttatctaccacacctctcgcctgcatagcgggattcccgcacgctttagcgggtctggaagcgggaccgactacactctgaccatctcatctctccagcccgaggacttcgccgtctacttctgccagcagggtaacaccctgccgtacaccttcggccagggcaccaagcttgagatcaaaaccactactcccgctccaaggccacccacccctgccccgaccatcgcctctcagccgctttccctgcgtccggaggcatgtagacccgcagctggtggggccgtgcatacccggggtcttgacttcgcctgcgatatctacatttgggcccctctggctggtacttgcggggtcctgctgctttcactcgtgatcactctttactgtaagcgcggtcggaagaagctgctgtacatctttaagcaacccttcatgaggcctgtgcagactactcaagaggaggacggctgttcatgccggttcccagaggaggaggaaggcggctgcgaactgcgcgtgaaattcagccgcagcgcagatgctccagcctacaagcaggggcagaaccagctctacaacgaactcaatcttggtcggagagaggagtacgacgtgctggacaagcggagaggacgggacccagaaatgggcgggaagccgcgcagaaagaatccccaagagggcctgtacaacgagctccaaaaggataagatggcagaagcctatagcgagattggtatgaaaggggaacgcagaagaggcaaaggccacgacggactgtaccagggactcagcaccgccaccaaggacacctatgacgctcttcacatgcaggccctgccgcctcgg

SEQ ID NO: 186 - DNA, 1458 bp, Artificial Sequence
  source: /note="Description of Artificial Sequence: Synthetic polynucleotide"
atggccctccctgtcaccgccctgctgcttccgctggctcttctgctccacgccgctcggcccgaaattgtgatgacccagtcacccgccactcttagcctttcacccggtgagcgcgcaaccctgtcttgcagagcctcccaagacatctcaaaataccttaattggtatcaacagaagcccggacaggctcctcgccttctgatctaccacaccagccggctccattctggaatccctgccaggttcagcggtagcggatctgggaccgactacaccctcactatcagctcactgcagccagaggacttcgctgtctatttctgtcagcaagggaacaccctgccctacacctttggacagggcaccaagctcgagattaaaggtggaggtggcagcggaggaggtgggtccggcggtggaggaagccaggtccaactccaagaaagcggaccgggtcttgtgaagccatcagaaactctttcactgacttgtactgtgagcggagtgtctctccccgattacggggtgtcttggatcagacagccaccggggaagggtctggaatggattggagtgatttggggctctgagactacttactacaactcatccctcaagtcacgcgtcaccatctcaaaggacaactctaagaatcaggtgtcactgaaactgtcatctgtgaccgcagccgacaccgccgtgtactattgcgctaagcattactattatggcgggagctacgcaatggattactggggacagggtactctggtcaccgtgtccagcaccactaccccagcaccgaggccacccaccccggctcctaccatcgcctcccagcctctgtccctgcgtccggaggcatgtagacccgcagctggtggggccgtgcatacccggggtcttgacttcgcctgcgatatctacatttgggcccctctggctggtacttgcggggtcctgctgctttcactcgtgatcactctttactgtaagcgcggtcggaagaagctgctgtacatctttaagcaacccttcatgaggcctgtgcagactactcaagaggaggacggctgttcatgccggttcccagaggaggaggaaggcggctgcgaactgcgcgtgaaattcagccgcagcgcagatgctccagcctacaagcaggggcagaaccagctctacaacgaactcaatcttggtcggagagaggagtacgacgtgctggacaagcggagaggacgggacccagaaatgggcgggaagccgcgcagaaagaatccccaagagggcctgtacaacgagctccaaaaggataagatggcagaagcctatagcgagattggtatgaaaggggaacgcagaagaggcaaaggccacgacggactgtaccagggactcagcaccgccaccaaggacacctatgacgctcttcacatgcaggccctgccgcctcgg

SEQ ID NO: 187 - DNA, 813 bp, Artificial Sequence
  source: /note="Description of Artificial Sequence: Synthetic polynucleotide"
atggccctgcccgtcaccgctctgctgctgccccttgctctgcttcttcatgcagcaaggccggacatccagatgacccaaaccacctcatccctctctgcctctcttggagacagggtgaccatttcttgtcgcgccagccaggacatcagcaagtatctgaactggtatcagcagaagccggacggaaccgtgaagctcctgatctaccatacctctcgcctgcatagcggcgtgccctcacgcttctctggaagcggatcaggaaccgattattctctcactatttcaaatcttgagcaggaagatattgccacctatttctgccagcagggtaataccctgccctacaccttcggaggagggaccaagctcgaaatcaccggtggaggaggcagcggcggtggagggtctggtggaggtggttctgaggtgaagctgcaagaatcaggccctggacttgtggccccttcacagtccctgagcgtgacttgcaccgtgtccggagtctccctgcccgactacggagtgtcatggatcagacaacctccacggaaaggactggaatggctcggtgtcatctggggtagcgaaactacttactacaattcagccctcaaaagcaggctgactattatcaaggacaacagcaagtcccaagtctttcttaagatgaactcactccagactgacgacaccgcaatctactattgtgctaagcactactactacggaggatcctacgctatggattactggggacaaggtacttccgtcactgtctcttcacaccatcatcaccatcaccatcac

SEQ ID NO: 188 - protein, 271 aa, Artificial Sequence
  source: /note="Description of Artificial Sequence: Synthetic polypeptide"
MALPVTALLLPLALLLHAARPDIQMTQTTSSLSASLGDRVTISCRASQDISKYLNWYQQKPDGTVKLLIYHTSRLHSGVPSRFSGSGSGTDYSLTISNLEQEDIATYFCQQGNTLPYTFGGGTKLEITGGGGSGGGGSGGGGSEVKLQESGPGLVAPSQSLSVTCTVSGVSLPDYGVSWIRQPPRKGLEWLGVIWGSETTYYNSALKSRLTIIKDNSKSQVFLKMNSLQTDDTAIYYCAKHYYYGGSYAMDYWGQGTSVTVSSHHHHHHHH

SEQ ID NO: 189 - DNA, 1458 bp, Artificial Sequence
  source: /note="Description of Artificial Sequence: Synthetic polynucleotide"
atggccttaccagtgaccgccttgctcctgccgctggccttgctgctccacgccgccaggccggacatccagatgacacagactacatcctccctgtctgcctctctgggagacagagtcaccatcagttgcagggcaagtcaggacattagtaaatatttaaattggtatcagcagaaaccagatggaactgttaaactcctgatctaccatacatcaagattacactcaggagtcccatcaaggttcagtggcagtgggtctggaacagattattctctcaccattagcaacctggagcaagaagatattgccacttacttttgccaacagggtaatacgcttccgtacacgttcggaggggggaccaagctggagatcacaggtggcggtggctcgggcggtggtgggtcgggtggcggcggatctgaggtgaaactgcaggagtcaggacctggcctggtggcgccctcacagagcctgtccgtcacatgcactgtctcaggggtctcattacccgactatggtgtaagctggattcgccagcctccacgaaagggtctggagtggctgggagtaatatggggtagtgaaaccacatactataattcagctctcaaatccagactgaccatcatcaaggacaactccaagagccaagttttcttaaaaatgaacagtctgcaaactgatgacacagccatttactactgtgccaaacattattactacggtggtagctatgctatggactactggggccaaggaacctcagtcaccgtctcctcaaccacgacgccagcgccgcgaccaccaacaccggcgcccaccatcgcgtcgcagcccctgtccctgcgcccagaggcgtgccggccagcggcggggggcgcagtgcacacgagggggctggacttcgcctgtgatatctacatctgggcgcccttggccgggacttgtggggtccttctcctgtcactggttatcaccctttactgcaaacggggcagaaagaaactcctgtatatattcaaacaaccatttatgagaccagtacaaactactcaagaggaagatggctgtagctgccgatttccagaagaagaagaaggaggatgtgaactgagagtgaagttcagcaggagcgcagacgcccccgcgtacaagcagggccagaaccagctctataacgagctcaatctaggacgaagagaggagtacgatgttttggacaagagacgtggccgggaccctgagatggggggaaagccgagaaggaagaaccctcaggaaggcctgtacaatgaactgcagaaagataagatggcggaggcctacagtgagattgggatgaaaggcgagcgccggaggggcaaggggcacgatggcctttaccagggtctcagtacagccaccaaggacacctacgacgcccttcacatgcaggccctgccccctcgc

SEQ ID NO: 190-193 - skipped (4 entries)

SEQ ID NO: 194 - protein, 244 aa, Artificial Sequence
  source: /note="Description of Artificial Sequence: Synthetic polypeptide"
QVQLLESGAELVRPGSSVKISCKASGYAFSSYWMNWVKQRPGQGLEWIGQIYPGDGDTNYNGKFKGQATLTADKSSSTAYMQLSGLTSEDSAVYSCARKTISSVVDFYFDYWGQGTTVTGGGSGGGSGGGSGGGSELVLTQSPKFMSTSVGDRVSVTCKASQNVGTNVAWYQQKPGQSPKPLIYSATYRNSGVPDRFTGSGSGTDFTLTITNVQSKDLADYFCQYNRYPYTSFFFTKLEIKRRS

SEQ ID NO: 195 - protein, 464 aa, Artificial Sequence
  source: /note="Description of Artificial Sequence: Synthetic polypeptide"
QVQLLESGAELVRPGSSVKISCKASGYAFSSYWMNWVKQRPGQGLEWIGQIYPGDGDTNYNGKFKGQATLTADKSSSTAYMQLSGLTSEDSAVYSCARKTISSVVDFYFDYWGQGTTVTGGGSGGGSGGGSGGGSELVLTQSPKFMSTSVGDRVSVTCKASQNVGTNVAWYQQKPGQSPKPLIYSATYRNSGVPDRFTGSGSGTDFTLTITNVQSKDLADYFCQYNRYPYTSFFFTKLEIKRRSKIEVMYPPPYLDNEKSNGTIIHVKGKHLCPSPLFPGPSKPFWVLVVVGGVLACYSLLVTVAFIIFWVRSKRSRLLHSDYMNMTPRRPGPTRKHYQPYAPPRDFAAYRSRVKFSRSADAPAYQQGQNQLYNELNLGRREEYDVLDKRRGRDPEMGGKPRRKNPQEGLYNELQKDKMAEAYSEIGMKGERRRGKGHDGLYQGLSTATKDTYDALHMQALPPR

SEQ ID NO: 196 - protein, 246 aa, Artificial Sequence
  source: /note="Description of Artificial Sequence: Synthetic polypeptide"
DIQMTQTTSSLSASLGDRVTISCRASQDISKYLNWYQQKPDGTVKLLIYHTSRLHSGVPSRFSGSGSGTDYSLTISNLEQEDIATYFCQQGNTLPYTFGGGTKLEITGSTSGSGKPGSGEGSTKGEVKLQESGPGLVAPSQSLSVTCTVSGVSLPDYGVSWIRQPPRKGLEWLGVIWGSETTYYNSALKSRLTIIKDNSKSQVFLKMNSLQTDDTAIYYCAKHYYYGGSYAMDYWGQGTSVTVSSE

SEQ ID NO: 197 - protein, 439 aa, Artificial Sequence
  source: /note="Description of Artificial Sequence: Synthetic polypeptide"
DIQMTQTTSSLSASLGDRVTISCRASQDISKYLNWYQQKPDGTVKLLIYHTSRLHSGVPSRFSGSGSGTDYSLTISNLEQEDIATYFCQQGNTLPYTFGGGTKLEITGSTSGSGKPGSGEGSTKGEVKLQESGPGLVAPSQSLSVTCTVSGVSLPDYGVSWIRQPPRKGLEWLGVIWGSETTYYNSALKSRLTIIKDNSKSQVFLKMNSLQTDDTAIYYCAKHYYYGGSYAMDYWGQGTSVTVSSESKYGPPCPPCPMFWVLVVVGGVLACYSLLVTVAFIIFWVKRGRKKLLYIFKQPFMRPVQTTQEEDGCSCRFEEEEGGCELRVKFSRSADAPAYQQGQNQLYNELNLGRREEYDVLDKRRGRDPEMGGKPRRKNPQEGLYNELQKDKMAEAYSEIGMKGERRRGKGHDGLYQGLSTATKDTYDALHMQALPPRL

SEQ ID NO: 198 - protein, 819 aa, Artificial Sequence
  source: /note="Description of Artificial Sequence: Synthetic polypeptide"
DIQMTQTTSSLSASLGDRVTISCRASQDISKYLNWYQQKPDGTVKLLIYHTSRLHSGVPSRFSGSGSGTDYSLTISNLEQEDIATYFCQQGNTLPYTFGGGTKLEITGSTSGSGKPGSGEGSTKGEVKLQESGPGLVAPSQSLSVTCTVSGVSLPDYGVSWIRQPPRKGLEWLGVIWGSETTYYNSALKSRLTIIKDNSKSQVFLKMNSLQTDDTAIYYCAKHYYYGGSYAMDYWGQGTSVTVSSESKYGPPCPPCPMFWVLVVVGGVLACYSLLVTVAFIIFWVKRGRKKLLYIFKQPFMRPVQTTQEEDGCSCRFEEEEGGCELRVKFSRSADAPAYQQGQNQLYNELNLGRREEYDVLDKRRGRDPEMGGKPRRKNPQEGLYNELQKDKMAEAYSEIGMKGERRRGKGHDGLYQGLSTATKDTYDALHMQALPPRLEGGGEGRGSLLTCGDVEENPGPRMLLLVTSLLLCELPHPAFLLIPRKVCNGIGIGEFKDSLSINATNIKHFKNCTSISGDLHILPVAFRGDSFTHTPPLDPQELDILKTVKEITGFLLIQAWPENRTDLHAFENLEIIRGRTKQHGQFSLAVVSLNITSLGLRSLKEISDGDVIISGNKNLCYANTINWKKLFGTSGQKTKIISNRGENSCKATGQVCHALCSPEGCWGPEPRDCVSCRNVSRGRECVDKCNLLEGEPREFVENSECIQCHPECLPQAMNITCTGRGPDNCIQCAHYIDGPHCVKTCPAGVMGENNTLVWKYADAGHVCHLCHPNCTYGCTGPGLEGCPTNGPKIPSIATGMVGALLLLLVVALGIGLFM

SEQ ID NO: 199 - protein, 245 aa, Artificial Sequence
  source: /note="Description of Artificial Sequence: Synthetic polypeptide"
DIQMTQTTSSLSASLGDRVTISCRASQDISKYLNWYQQKPDGTVKLLIYHTSRLHSGVPSRFSGSGSGTDYSLTISNLEQEDIATYFCQQGNTLPYTFGGGTKLEITGSTSGSGKPGSGEGSTKGEVKLQESGPGLVAPSQSLSVTCTVSGVSLPDYGVSWIRQPPRKGLEWLGVIWGSETTYYNSALKSRLTIIKDNSKSQVFLKMNSLQTDDTAIYYCAKHYYYGGSYAMDYWGQGTSVTVSS

SEQ ID NO: 200 - protein, 467 aa, Artificial Sequence
  source: /note="Description of Artificial Sequence: Synthetic polypeptide"
DIQMTQTTSSLSASLGDRVTISCRASQDISKYLNWYQQKPDGTVKLLIYHTSRLHSGVPSRFSGSGSGTDYSLTISNLEQEDIATYFCQQGNTLPYTFGGGTKLEITGSTSGSGKPGSGEGSTKGEVKLQESGPGLVAPSQSLSVTCTVSGVSLPDYGVSWIRQPPRKGLEWLGVIWGSETTYYNSALKSRLTIIKDNSKSQVFLKMNSLQTDDTAIYYCAKHYYYGGSYAMDYWGQGTSVTVSSAAAIEVMYPPPYLDNEKSNGTIIHVKGKHLCPSPLFPGPSKPFWVLVVVGGVLACYSLLVTVAFIIFWVRSKRSRLLHSDYMNMTPRRPGPTRKHYQPYAPPRDFAAYRSRVKFSRSADAPAYQQGQNQLYNELNLGRREEYDVLDKRRGRDPEMGGKPRRKNPQEGLYNELQKDKMAEAYSEIGMKGERRRGKGHDGLYQGLSTATKDTYDALHMQALPPR

SEQ ID NO: 201 - protein, 486 aa, Artificial Sequence
  source: /note="Description of Artificial Sequence: Synthetic polypeptide"
  MOD_RES (486)..(486): Any amino acid
MALPVTALLLPLALLLHAEVKLQQSGAELVRPGSSVKISCKASGYAFSSYWMNWVKQRPGQGLEWIGQIYPGDGDTNYNGKFKGQATLTADKSSSTAYMQLSGLTSEDSAVYFCARKTISSVVDFYFDYWGQGTTVTVSSGGGGSGGGGSGGGGSDIELTQSPKFMSTSVGDRVSVTCKASQNVGTNVAWYQQKPGQSPKPLIYSATYRNSGVPDRFTGSGSGTDFTLTITNVQSKDLADYFCQQYNRYPYTSGGGTKLEIKRAAAIEVMYPPPYLDNEKSNGTIIHVKGKHLCPSPLFPGPSKPFWVLVVVGGVLACYSLLVTVAFIIFWVRSKRSRLLHSDYMNMTPRRPGPTRKHYQPYAPPRDFAAYRSRVKFSRSAEPPAYQQGQNQLYNELNLGRREEYDVLDKRRGRDPEMGGKPRRKNPQEGLYNELQKDKMAEAYSEIGMKGERRRGKGHDGLYQGLSTATKDTYDALHMQALPPRX

SEQ ID NO: 202 - DNA, 1458 bp, Artificial Sequence
  source: /note="Description of Artificial Sequence: Synthetic polynucleotide"
ccatggctctcccagtgactgccctactgcttcccctagcgcttctcctgcatgcagaggtgaagctgcagcagtctggggctgagctggtgaggcctgggtcctcagtgaagatttcctgcaaggcttctggctatgcattcagtagctactggatgaactgggtgaagcagaggcctggacagggtcttgagtggattggacagatttatcctggagatggtgatactaactacaatggaaagttcaagggtcaagccacactgactgcagacaaatcctccagcacagcctacatgcagctcagcggcctaacatctgaggactctgcggtctatttctgtgcaagaaagaccattagttcggtagtagatttctactttgactactggggccaagggaccacggtcaccgtctcctcaggtggaggtggatcaggtggaggtggatctggtggaggtggatctgacattgagctcacccagtctccaaaattcatgtccacatcagtaggagacagggtcagcgtcacctgcaaggccagtcagaatgtgggtactaatgtagcctggtatcaacagaaaccaggacaatctcctaaaccactgatttactcggcaacctaccggaacagtggagtccctgatcgcttcacaggcagtggatctgggacagatttcactctcaccatcactaacgtgcagtctaaagacttggcagactatttctgtcaacaatataacaggtatccgtacacgtccggaggggggaccaagctggagatcaaacgggcggccgcaattgaagttatgtatcctcctccttacctagacaatgagaagagcaatggaaccattatccatgtgaaagggaaacacctttgtccaagtcccctatttcccggaccttctaagcccttttgggtgctggtggtggttggtggagtcctggcttgctatagcttgctagtaacagtggcctttattattttctgggtgaggagtaagaggagcaggctcctgcacagtgactacatgaacatgactccccgccgccccgggcccacccgcaagcattaccagccctatgccccaccacgcgacttcgcagcctatcgctccagagtgaagttcagcaggagcgcagagccccccgcgtaccagcagggccagaaccagctctataacgagctcaatctaggacgaagagaggagtacgatgttttggacaagagacgtggccgggaccctgagatggggggaaagccgagaaggaagaaccctcaggaaggcctgtacaatgaactgcagaaagataagatggcggaggcctacagtgagattgggatgaaaggcgagcgccggaggggcaaggggcacgatggcctttaccagggtctcagtacagccaccaaggacacctacgacgcccttcacatgcaggccctgccccctcgcg

SEQ ID NO: 203-212 - skipped (10 entries)

SEQ ID NO: 213 - protein, 465 aa, Artificial Sequence
  source: /note="Description of Artificial Sequence: Synthetic polypeptide"
DIQMTQTTSSLSASLGDRVTISCRASQDISKYLNWYQQKPDGTVKLLIYHTSRLHSGVPSRFSGSGSGTDYSLTISNLEQEDIATYFCQQGNTLPYTFGGGTKLEITGGGGSGGGGSGGGGSEVKLQESGPGLVAPSQSLSVTCTVSGVSLPDYGVSWIRQPPRKGLEWLGVIWGSETTYYNSALKSRLTIIKDNSKSQVFLKMNSLQTDDTAIYYCAKHYYYGGSYAMDYWGQGTSVTVSSTTTPAPRPPTPAPTIASQPLSLRPEACRPAAGGAVHTRGLDFACDIYIWAPLAGTCGVLLLSLVITLYCKRGRKKLLYIFKQPFMRPVQTTQEEDGCSCRFPEEEEGGCELRVKFSRSADAPAYKQGQNQLYNELNLGRREEYDVLDKRRGRDPEMGGKPRRKNPQEGLYNELQKDKMAEAYSEIGMKGERRRGKGHDGLYQGLSTATKDTYDALHMQALPPR

SEQ ID NO: 214 - protein, 5 aa, Artificial Sequence
  source: /note="Description of Artificial Sequence: Synthetic peptide"
DYGVS

SEQ ID NO: 215 - skipped

SEQ ID NO: 216 - protein, 119 aa, Artificial Sequence
  source: /note="Description of Artificial Sequence: Synthetic polypeptide"
QVQLLESGAELVRPGSSVKISCKASGYAFSSYWMNWVKQRPGQGLEWIGQIYPGDGDTNYNGKFKGQATLTADKSSSTAYMQLSGLTSEDSAVYSCARKTISSVVDFYFDYWGQGTTVT

SEQ ID NO: 217 - protein, 111 aa, Artificial Sequence
  source: /note="Description of Artificial Sequence: Synthetic polypeptide"
ELVLTQSPKFMSTSVGDRVSVTCKASQNVGTNVAWYQQKPGQSPKPLIYSATYRNSGVPDRFTGSGSGTDFTLTITNVQSKDLADYFYFCQYNRYPYTSGGGTKLEIKRRS

SEQ ID NO: 218 - protein, 120 aa, Artificial Sequence
  source: /note="Description of Artificial Sequence: Synthetic polypeptide"
EVKLQESGPGLVAPSQSLSVTCTVSGVSLPDYGVSWIRQPPRKGLEWLGVIWGSETTYYNSALKSRLTIIKDNSKSQVFLKMNSLQTDDTAIYYCAKHYYYGGSYAMDYWGQGTSVTVSS

SEQ ID NO: 219 - protein, 120 aa, Artificial Sequence
  source: /note="Description of Artificial Sequence: Synthetic polypeptide"
QVQLQESGPGLVKPSETLSLTCTVSGVSLPDYGVSWIRQPPGKGLEWIGVIWGSETTYYSSSLKSRVTISKDNSKNQVSLKLSSVTAADTAVYYCAKHYYYGGSYAMDYWGQGTLVTVSS

SEQ ID NO: 220 - protein, 120 aa, Artificial Sequence
  source: /note="Description of Artificial Sequence: Synthetic polypeptide"
QVQLQESGPGLVKPSETLSLTCTVSGVSLPDYGVSWIRQPPGKGLEWIGVIWGSETTYYQSSLKSRVTISKDNSKNQVSLKLSSVTAADTAVYYCAKHYYYGGSYAMDYWGQGTLVTVSS

SEQ ID NO: 221 - protein, 120 aa, Artificial Sequence
  source: /note="Description of Artificial Sequence: Synthetic polypeptide"
QVQLQESGPGLVKPSETLSLTCTVSGVSLPDYGVSWIRQPPGKGLEWIGVIWGSETTYYNSSLKSRVTISKDNSKNQVSLKLSSVTAADTAVYYCAKHYYYGGSYAMDYWGQGTLVTVSS

SEQ ID NO: 222 - protein, 107 aa, Artificial Sequence
  source: /note="Description of Artificial Sequence: Synthetic polypeptide"
DIQMTQTTSSLSASLGDRVTISCRASQDISKYLNWYQQKPDGTVKLLIYHTSRLHSGVPSRFSGSGSGTDYSLTISNLEQEDIATYFCQQGNTLPYTFGGGTKLEIT

SEQ ID NO: 223 - protein, 107 aa, Artificial Sequence
  source: /note="Description of Artificial Sequence: Synthetic polypeptide"
EIVMTQSPATLSLSPGERATLSCRASQDISKYLNWYQQKPGQAPRLLIYHTSRLHSGIPARFSGSGSGTDYTLTISSLQPEDFAVYFCQQGNTLPYTFGQGTKLEIK

SEQ ID NO: 224 - protein, 16 aa, Artificial Sequence
  source: /note="Description of Artificial Sequence: Synthetic peptide"
RIYYRSKWYNSYAVSV

SEQ ID NO: 225 - protein, 12 aa, Artificial Sequence
  source: /note="Description of Artificial Sequence: Synthetic peptide"
RASQMIDLRYLS

SEQ ID NO: 226 - protein, 11 aa, Artificial Sequence
  source: /note="Description of Artificial Sequence: Synthetic peptide"
LLIYGSSSRAT

SEQ ID NO: 227 - protein, 8 aa, Artificial Sequence
  source: /note="Description of Artificial Sequence: Synthetic peptide"
QQLYSSPM

SEQ ID NO: 228 - protein, 110 aa, Artificial Sequence
  source: /note="Description of Artificial Sequence: Synthetic polypeptide"
DIVLTQSPATLSLSPGERATLSCRASQMIDLRYLSWYQQKPGQAPRLLIYGSSSRATGVPARFSGSGSGTDFTLTISSLEPEDFAVYYCQQLYSSPMTFGQGTKVEIKRT

SEQ ID NO: 229 - protein, 16 aa, Artificial Sequence
  source: /note="Description of Artificial Sequence: Synthetic peptide"
RIYYRSKWYNNYAVSV

SEQ ID NO: 230 - protein, 12 aa, Artificial Sequence
  source: /note="Description of Artificial Sequence: Synthetic peptide"
YKWVPKIGVFDS

SEQ ID NO: 231 - protein, 124 aa, Artificial Sequence
  source: /note="Description of Artificial Sequence: Synthetic polypeptide"
QVQLQQSGPGLVKPSQTLSLTCAISGDSVSSNSAAWGWIRQSPGRGLEWLGRIYYRSKWYNNYAVSVKSRITINPDTSKNQFSLQLNSVTPEDTAVYYCARYKWVPKIGVFDSWGQGTLVTVSS

SEQ ID NO: 232 - protein, 8 aa, Artificial Sequence
  source: /note="Description of Artificial Sequence: Synthetic peptide"
QQFYSSPL

SEQ ID NO: 233 - protein, 110 aa, Artificial Sequence
  source: /note="Description of Artificial Sequence: Synthetic polypeptide"
DIVLTQSPATLSLSPGERATLSCRASQMIDLRYLSWYQQKPGQAPRLLIYGSSSRATGVPARFSGSGSGTDFTLTISSLEPEDFAVYYCQQFYSSPLTFGQGTKVEIKRT

SEQ ID NO: 234 - protein, 12 aa, Artificial Sequence
  source: /note="Description of Artificial Sequence: Synthetic peptide"
YQWVPKIGVFDS

SEQ ID NO: 235 - protein, 124 aa, Artificial Sequence
  source: /note="Description of Artificial Sequence: Synthetic polypeptide"
QVQLQQSGPGLVKPSQTLSLTCAISGDSVSSNSAAWGWIRQSPGRGLEWLGRIYYRSKWYNSYAVSVKSRITINPDTSKNQFSLQLNSVTPEDTAVYYCARYQWVPKIGVFDSWGQGTLVTVSS

SEQ ID NO: 236 - protein, 12 aa, Artificial Sequence
  source: /note="Description of Artificial Sequence: Synthetic peptide"
RASQEILPEYLS

SEQ ID NO: 237 - protein, 110 aa, Artificial Sequence
  source: /note="Description of Artificial Sequence: Synthetic polypeptide"
DIVLTQSPATLSLSPGERATLSCRASQEILPEYLSWYQQKPGQAPRLLIYGSSSRATGVPARFSGSGSGTDFTLTISSLEPEDFAVYYCQQFYSSPLTFGQGTKVEIKRT

SEQ ID NO: 238 - protein, 12 aa, Artificial Sequence
  source: /note="Description of Artificial Sequence: Synthetic peptide"
YDWVPKIGVFDL

SEQ ID NO: 239 - protein, 124 aa, Artificial Sequence
  source: /note="Description of Artificial Sequence: Synthetic polypeptide"
QVQLQQSGPGLVKPSQTLSLTCAISGDSVSSNSAAWGWIRQSPGRGLEWLGRIYYRSKWYNSYAVSVKSRITINPDTSKNQFSLQLNSVTPEDTAVYYCARYDWVPKIGVFDLWGQGTLVTVSS

SEQ ID NO: 240 - protein, 12 aa, Artificial Sequence
  source: /note="Description of Artificial Sequence: Synthetic peptide"
RASQWIEAGYLS

SEQ ID NO: 241 - protein, 110 aa, Artificial Sequence
  source: /note="Description of Artificial Sequence: Synthetic polypeptide"
DIVLTQSPATLSLSPGERATLSCRASQWIEAGYLSWYQQKPGQAPRLLIYGSSSRATGVPARFSGSGSGTDFTLTISSLEPEDFAVYYCQQLYSSPMTFGQGTKVEIKRT

SEQ ID NO: 242 - protein, 16 aa, Artificial Sequence
  source: /note="Description of Artificial Sequence: Synthetic peptide"
RIYYRSKWWNDYAVSV

SEQ ID NO: 243 - protein, 12 aa, Artificial Sequence
  source: /note="Description of Artificial Sequence: Synthetic peptide"
YDWVPKIGVFDG

SEQ ID NO: 244 - protein, 124 aa, Artificial Sequence
  source: /note="Description of Artificial Sequence: Synthetic polypeptide"
QVQLQQSGPGLVKPSQTLSLTCAISGDSVSSNSAAWGWIRQSPGRGLEWLGRIYYRSKWWNDYAVSVKSRITINPDTSKNQFSLQLNSVTPEDTAVYYCARYDWVPKIGVFDGWGQGTLVTVSS

SEQ ID NO: 245 - protein, 18 aa, Artificial Sequence
  source: /note="Description of Artificial Sequence: Synthetic peptide"
RIYYRSKWYNDYAVSVKS

SEQ ID NO: 246 - protein, 124 aa, Artificial Sequence
  source: /note="Description of Artificial Sequence: Synthetic polypeptide"
QVQLQQSGPGLVKPSQTLSLTCAISGDSVSSNSAAWGWIRQSPGRGLEWLGRIYYRSKWYNDYAVSVKSRITINPDTSKNQFSLQLNSVTPEDTAVYYCARYDWVPKIGVFDSWGQGTLVTVSS

SEQ ID NO: 247 - protein, 9 aa, Artificial Sequence
  source: /note="Description of Artificial Sequence: Synthetic peptide"
QQVYDIPIT

SEQ ID NO: 248 - protein, 110 aa, Artificial Sequence
  source: /note="Description of Artificial Sequence: Synthetic polypeptide"
DIVLTQSPATLSLSPGERATLSCRASQFISSSYLSWYQQKPGQAPRLLIYGSSSRATGVPARFSGSGSGTDFTLTISSLEPEDFAVYYCQQVYDIPITFGQGTKVEIKRT

SEQ ID NO: 249 - DNA, 1419 bp, Artificial Sequence
  source: /note="Description of Artificial Sequence: Synthetic polynucleotide"
atggcctgggtgtggaccctgcccttcctgatggccgctgcccagtcagtgcaggcccaggtgcagctgcagcagagcggcccaggcctggtcaagccctctcagaccctgtcactgacctgcgccatttcaggcgacagcgtgagcagcaacagcgccgcctggggctggatcaggcagagccccggtaggggcctggaatggctgggcaggatctactacaggtccaagtggtacaacagctacgccgtgagcgtgaagagcaggatcaccatcaaccctgacaccagcaagaaccagttctcactgcagctcaacagcgtgacccccgaggacaccgccgtgtactactgcgccagatacgactgggtgcccaagatcggcgtgttcgacagctggggccagggcaccctggtgaccgtgtcaagcgccagcaccaagggccccagcgtgttccccctggcccccagcagcaagagcaccagcggcggcacagccgccctgggctgcctggtgaaggactacttccccgagcccgtgaccgtgtcctggaacagcggagccctgacctccggcgtgcacaccttccccgccgtgctgcagagcagcggcctgtacagcctgtccagcgtggtgacagtgcccagcagcagcctgggcacccagacctacatctgcaacgtgaaccacaagcccagcaacaccaaggtggacaagagagtggagcccaagagctgcgacaagacccacacctgccccccctgcccagccccagagctgctgggcggaccctccgtgttcctgttcccccccaagcccaaggacaccctgatgatcagcaggacccccgaggtgacctgcgtggtggtggacgtgagccacgaggacccagaggtgaagttcaactggtacgtggacggcgtggaggtgcacaacgccaagaccaagcccagagaggagcagtacaacagcacctacagggtggtgtccgtgctgaccgtgctgcaccaggactggctgaacggcaaggaatacaagtgcaaggtctccaacaaggccctgccagcccccatcgaaaagaccatcagcaaggccaagggccagccacgggagccccaggtgtacaccctgcccccctcccgggaggagatgaccaagaaccaggtgtccctgacctgtctggtgaagggcttctaccccagcgacatcgccgtggagtgggagagcaacggccagcccgagaacaactacaagaccacccccccagtgctggacagcgacggcagcttcttcctgtacagcaagctgaccgtggacaagtccaggtggcagcagggcaacgtgttcagctgcagcgtgatgcacgaggccctgcacaaccactacacccagaagagcctgagcctgtcccccggcaag

SEQ ID NO: 250 - DNA, 705 bp, Artificial Sequence
  source: /note="Description of Artificial Sequence: Synthetic polynucleotide"
atgagcgtgctgacccaggtgctggctctgctgctgctgtggctgaccggcaccagatgcgatatcgtgctgacacagagccccgccaccctgagcctgagcccaggcgagagggccaccctgtcctgcagggccagccagtttatcagcagcagctacctgtcctggtatcagcagaagcccggccaggcccctagactgctgatctacggcagctcctctcgggccaccggcgtgcccgccaggttcagcggcagcggctccggcaccgacttcaccctgacaatcagcagcctggagcccgaggacttcgccgtgtactactgccagcagctgtacagctcacccatgaccttcggccagggcaccaaggtggagatcaagcgtacggtggccgctcccagcgtgttcatcttcccccccagcgacgagcagctgaagagcggcaccgccagcgtggtgtgcctgctgaacaacttctacccccgggaggccaaggtgcagtggaaggtggacaacgccctgcagagcggcaacagccaggagagcgtcaccgagcaggacagcaaggactccacctacagcctgagcagcaccctgaccctgagcaaggccgactacgagaagcataaggtgtacgcctgcgaggtgacccaccagggcctgtccagccccgtgaccaagagcttcaacaggggcgagtgc

SEQ ID NO: 251 - protein, 225 aa, Artificial Sequence
  source: /note="Description of Artificial Sequence: Synthetic polypeptide"
DKTHTCPPCPAPELLGGPSVFLFPPKPKDTLMISRTPEVTCVVVDVSHEDPEVKFNWYVDGVEVHNAKTKPREEQYNSTYRVVSVLTVLHQDWLNGKEYKCKVSNKALPAPIEKTISKAKGQPREPQVYTLPPSRDELTKNQVSLTCLVKGFYPSDIAVEWESNGQPENNYKTTPPVLDSDGSFFLYSKLTVDKSRWQQGNVFSCSVMHEALHNHYTQKSLSLSP

SEQ ID NO: 252 - protein, 227 aa, Artificial Sequence
  source: /note="Description of Artificial Sequence: Synthetic polypeptide"
DKTHTCPPCPAPELLGGPSVFLFPPKPKDTLMISRTPEVTCVVVDVSHEDPEVKFNWYVDGVEVHNAKTKPREEQYNSTYRVVSVLTVLHQDWLNGKEYKCKVSNKALPAPIEKTISKAKGQPREPQVCTLPPSREEMTKNQVSLSCAVKGFYPSDIAVEWESNGQPENNYKTTPPVLDSDGSFFLVSKLTVDKSRWQQGNVFSCSVMHEALHNHYTQKSLSLSPGK

SEQ ID NO: 253 - protein, 227 aa, Artificial Sequence
  source: /note="Description of Artificial Sequence: Synthetic polypeptide"
DKTHTCPPCPAPELLGGPSVFLFPPKPKDTLMISRTPEVTCVVVDVSHEDPEVKFNWYVDGVEVHNAKTKPREEQYNSTYRVVSVLTVLHQDWLNGKEYKCKVSNKALPAPIEKTISKAKGQPREPQVYTLPPCREEMTKNQVSLWCLVKGFYPSDIAVEWESNGQPENNYKTTPPVLDSDGSFFLYSKLTVDKSRWQQGNVFSCSVMHEALHNHYTQKSLSLSPGK

SEQ ID NO: 254 - protein, 227 aa, Artificial Sequence
  source: /note="Description of Artificial Sequence: Synthetic polypeptide"
DKTHTCPPCPAPELLGGPSVFLFPPKPKDTLMISRTPEVTCVVVDVSHEDPEVKFNWYVDGVEVHNAKTKPREEQYNSTYRVVSVLTVLHQDWLNGKEYKCKVSNKALPAPIEKTISKAKGQPREPQVYTLPPCREEMTKNQVSLWCLVKGFYPSDIAVEWESNGQPENNYKTTPPVLDSDGSFFLYSKLTVDKSRWQQGNVFSCSVMHEALHNRYTQKSLSLSPGK

SEQ ID NO: 255-768 - skipped (514 entries)

SEQ ID NO: 769 - protein, 8 aa, Artificial Sequence
  source: /note="Description of Artificial Sequence: Synthetic 8xHis tag"
HHHHHHHH

SEQ ID NO: 770 - protein, 8 aa, Artificial Sequence
  source: /note="Description of Artificial Sequence: Synthetic peptide"
EVNLYFQS

SEQ ID NO: 771-1093 - skipped (323 entries)

SEQ ID NO: 1094 - protein, 719 aa, Artificial Sequence
  source: /note="Description of Artificial Sequence: Synthetic polypeptide"
QVQLQESGPGLVKPSETLSLTCTVSGVSLPDYGVSWIRQPPGKGLEWIGVIWGSETTYYQSSLKSRVTISKDNSKNQVSLKLSSVTAADTAVYYCAKHYYYGGSYAMDYWGQGTLVTVSSASTKGPSVFPLAPSSKSTSGGTAALGCLVKDYFPEPVTVSWNSGALTSGVHTFPAVLQSSGLYSLSSVVTVPSSSLGTQTYICNVNHKPSNTKVDKRVEPKSCGGGGSGGGGSEVQLVESGGGLVQPGGSLKLSCAASGFTFNTYAMNWVRQASGKGLEWVGRIRSKYNNYATYYADSVKDRFTISRDDSKSTLYLQMNSLKTEDTAVYYCVRHGNFGNSYVSWFAYWGQGTLVTVSSGGGGSGGGGSGGGGSGGGGSQAVVTQEPSLTVSPGGTVTLTCRSSTGAVTTSNYANWVQQKPGQAPRGLIGGTNKRAPWTPARFSGSLLGDKAALTLSGAQPEDEAEYFCALWYSNLWVFGGGTKLTVLGGGGSDKTHTCPPCPAPELLGGPSVFLFPPKPKDTLMISRTPEVTCVVVAVSHEDPEVKFNWYVDGVEVHNAKTKPREEQYGSTYRVVSVLTVLHQDWLNGKEYKCKVSNKALAAPIEKTISKAKGQPREPQVCTLPPSRDELTKNQVSLSCAVKGFYPSDIAVEWESNGQPENNYKTTPPVLDSDGSFFLVSKLTVDKSRWQQGNVFSCSVMHEALHNHYTQKSLSLSPGK

SEQ ID NO: 1095-1109 - skipped (15 entries)

SEQ ID NO: 1110 - protein, 215 aa, Artificial Sequence; identical to SEQ ID NO: 64
  source: /note="Description of Artificial Sequence: Synthetic polypeptide"

SEQ ID NO: 1111 - DNA, 645 bp, Artificial Sequence
  source: /note="Description of Artificial Sequence: Synthetic polynucleotide"
gagatcgtgatgacacagtctccagccacactgtccgtgtctccaggcgagagagctacactgagctgtagagccagccaggatgtgggaacagccgtggcctggtatcagcagaaacctggacaagcccctcggctgctgatctactgggcctctacaagacacacaggcatccctgccagattttctggcagcggctctggcaccgagttcaccctgacaatctctagcctccagagcgaggacttcgccgtgtacttctgccagcagtacgccaactttcccctgtacacctttggccagggcaccaagctggaaatcaagagaacagtggccgctccgagcgtgttcatctttccaccaagcgacgagcagctgaaaagcggcacagcctctgtcgtgtgcctgctgaacaacttctaccccagagaagccaaggtgcagtggaaggtggacaatgccctccagtccggcaatagccaagagagcgtgaccgagcaggacagcaaggatagcacatacagcctgagcagcacactgaccctgagcaaggccgactacgagaagcacaaagtgtacgcctgcgaagtgacacaccagggcctgtctagccctgtgaccaagagcttcaacagaggcgagtgc

SEQ ID NO: 1112 - protein, 719 aa, Artificial Sequence
  source: /note="Description of Artificial Sequence: Synthetic polypeptide"
QVQLVQSGAEVKKPGASVKVSCKASGYTFTTYWIQWVRQAPGQRLEWMGAVYPGDADTRYTQKFQGRVTLTADRSASTAYMELSSLRSEDTAVYYCGRDAGLEYYALDYWGQGTLVTVSSASTKGPSVFPLAPSSKSTSGGTAALGCLVKDYFPEPVTVSWNSGALTSGVHTFPAVLQSSGLYSLSSVVTVPSSSLGTQTYICNVNHKPSNTKVDKRVEPKSCGGGGSGGGGSEVQLVESGGGLVQPGGSLKLSCAASGFTFNTYAMNWVRQASGKGLEWVGRIRSKYNNYATYYADSVKDRFTISRDDSKSTLYLQMNSLKTEDTAVYYCVRHGNFGNSYVSWFAYWGQGTLVTVSSGGGGSGGGGSGGGGSGGGGSQAVVTQEPSLTVSPGGTVTLTCRSSTGAVTTSNYANWVQQKPGQAPRGLIGGTNKRAPWTPARFSGSLLGDKAALTLSGAQPEDEAEYFCALWYSNLWVFGGGTKLTVLGGGGSDKTHTCPPCPAPELLGGPSVFLFPPKPKDTLMISRTPEVTCVVVDVSHEDPEVKFNWYVDGVEVHNAKTKPREEQYNSTYRVVSVLTVLHQDWLNGKEYKCKVSNKALPAPIEKTISKAKGQPREPQVCTLPPSREEMTKNQVSLSCAVKGFYPSDIAVEWESNGQPENNYKTTPPVLDSDGSFFLVSKLTVDKSRWQQGNVFSCSVMHEALHNHYTQKSLSLSPGK

SEQ ID NO: 1113 - DNA, 2157 bp, Artificial Sequence
  source: /note="Description of Artificial Sequence: Synthetic polynucleotide"
caggttcaactggttcagagcggagccgaagtgaagaaacctggggccagcgtgaaggtgtcctgtaaagccagcggctacacctttaccacctactggattcagtgggtccgacaggcccctggacagagacttgaatggatgggagctgtgtaccccggcgacgccgataccagatacacccagaaattccagggcagagtgaccctgacagccgatagaagcgccagcacagcctacatggaactgagcagcctgagaagcgaggataccgccgtgtactactgtggcagagatgccggcctggaatattacgccctggactattggggccagggcaccctggttacagtgtcctctgcctctacaaagggcccctccgtttttccactggctcctagcagcaagagcacatctggtggaacagccgctctgggctgcctggtcaaggattactttcctgagcctgtgaccgtgtcctggaatagcggagcactgacaagcggcgtgcacacatttccagccgtgctgcaaagcagcggcctgtactctctgtctagcgtggtcacagtgcctagctctagcctgggcacccagacctacatctgcaacgtgaaccacaagcctagcaacaccaaggtcgacaagagagtggaacccaagtcttgtggtggcggaggatctggcggaggcggatctgaagttcagcttgttgaatctggcggcggactggtgcaacctggcggatctctgaaactgtcttgtgccgcctccggcttcaccttcaatacctacgccatgaactgggttcgacaagcctccggcaaaggactggaatgggtcggacggatcagaagcaagtacaacaactacgccacctactacgccgactccgtgaaggacagattcaccatcagccgggacgactccaagagcaccctgtacctccagatgaactccctgaaaaccgaggacacagccgtctattattgcgtgcggcacggcaacttcggcaacagctatgtgtcttggtttgcctactggggacagggaaccctcgtgaccgtttcttcaggcggcggtggtagtggcggtggtggtagcggaggcggtggatcaggtggcggcggttctcaagctgtggtcacacaagagcccagcctgacagtttctcctggcggaaccgtgacactgacctgtagatctagcaccggcgcagtgaccaccagcaattacgctaactgggtgcagcagaagcccggccaagctcctagaggactgatcggaggcacaaacaagagagccccttggacaccagccagattttctggctctctgctgggcgataaggccgctcttacactgtctggcgcacagcctgaagatgaggccgagtacttttgcgccctgtggtacagcaacctgtgggtgttcggcggaggaacaaagctgacagttcttggaggcggcggaagcgacaagacccacacatgtcctccatgtcctgctccagaactgctcggcggaccctccgtgtttctgttccctccaaagccaaaggacaccctgatgatcagcagaacccctgaagtgacctgcgtggtggtggatgtgtctcacgaggacccagaagtgaagttcaattggtacgtggacggcgtggaagtgcacaacgccaagaccaagcctagagaggaacagtacaacagcacctacagagtggtgtccgtgctgacagtgctgcaccaggactggctgaacggcaaagagtacaagtgcaaggtgtccaacaaggccctgcctgctcctatcgagaaaaccatcagcaaggccaagggccagcctagggaacctcaagtgtgcactctgcctccaagccgggaagagatgaccaagaatcaggtgtccctgagctgcgccgtgaagggcttttacccttccgatatcgccgtggaatgggagagcaatggccagccagagaacaactacaagaccacacctcctgtgctggacagcgacggctcattcttcctggtgtctaagctgaccgtggacaagagcagatggcagcagggcaacgtgttcagctgttctgtgatgcacgaggccctgcacaaccactacacacagaagtccctgtctctgagccccggcaaa

SEQ ID NO: 1114 - protein, 326 aa, Artificial Sequence
  source: /note="Description of Artificial Sequence: Synthetic polypeptide"
SQQIYGVVYGNVTFHVPSNVPLKEVLWKKQKDKVAELENSEFRAFSSFKNRVYLDTVSGSLTIYNLTSSDEDEYEMESPNITDTMKFFLYVLESGGGGSDKTHTCPPCPAPELLGGPSVFLFPPKPKDTLMISRTPEVTCVVVDVSHEDPEVKFNWYVDGVEVHNAKTKPREEQYNSTYRVVSVLTVLHQDWLNGKEYKCKVSNKALPAPIEKTISKAKGQPREPQVYTLPPCREEMTKNQVSLWCLVKGFYPSDIAVEWESNGQPENNYKTTPPVLDSDGSFFLYSKLTVDKSRWQQGNVFSCSVMHEALHNHYTQKSLSLSPGK

SEQ ID NO: 1115 - DNA, 978 bp, Artificial Sequence
  source: /note="Description of Artificial Sequence: Synthetic polynucleotide"
tctcagcagatctatggcgtggtgtacggcaacgtgaccttccacgtgccaagcaacgtgcccctgaaagaggtgctctggaagaaacagaaagacaaggtggccgagctggaaaacagcgagttcagagccttcagcagcttcaagaaccgggtgtacctggataccgtgtccggcagcctgaccatctacaatctgaccagcagcgacgaggacgagtacgagatggaaagccccaacatcaccgacaccatgaagttctttctgtacgtgctggaaagcggcggaggcggctctgataagacacacacatgtcctccatgtcctgctccagagctgctcggcggaccttctgttttcctgtttccacctaagccaaaggacaccctgatgatcagcagaacccctgaagtgacctgcgtggtggtggatgtgtctcacgaggaccccgaagtgaagttcaattggtacgtggacggcgtggaagtgcacaacgccaagaccaagcctagagaggaacagtacaacagcacctacagagtggtgtccgtgctgaccgtgctgcaccaggattggctgaacggcaaagagtacaagtgcaaggtgtccaacaaggccctgcctgctcctatcgagaaaaccatcagcaaggccaagggccagccaagagaaccccaggtttacaccctgcctccatgccgggaagagatgaccaagaatcaggtgtccctgtggtgcctggtcaagggcttctacccttccgatatcgccgtggaatgggagagcaatggccagcctgagaacaactacaagaccacacctcctgtgctggacagcgacggctcattcttcctgtacagcaagctgacagtggacaagagcagatggcagcagggcaacgtgttcagctgttctgtgatgcacgaggccctgcacaaccactacacccagaagtctctgtctctgagccccggcaaa

SEQ ID NO: 1116 - protein, 719 aa, Artificial Sequence; identical to SEQ ID NO: 74
  source: /note="Description of Artificial Sequence: Synthetic polypeptide"

SEQ ID NO: 1117 - DNA, 2157 bp, Artificial Sequence
  source: /note="Description of Artificial Sequence: Synthetic polynucleotide"
caggttcaactggttcagagcggagccgaagtgaagaaacctggggccagcgtgaaggtgtcctgtaaagccagcggctacacctttaccacctactggattcagtgggtccgacaggcccctggacagagacttgaatggatgggagctgtgtaccccggcgacgccgataccagatacacccagaaattccagggcagagtgaccctgacagccgatagaagcgccagcacagcctacatggaactgagcagcctgagaagcgaggataccgccgtgtactactgtggcagagatgccggcctggaatattacgccctggactattggggccagggcaccctggttacagtgtcctctgcctctacaaagggcccctccgtttttccactggctcctagcagcaagagcacatctggtggaacagccgctctgggctgcctggtcaaggattactttcctgagcctgtgaccgtgtcctggaatagcggagcactgacaagcggcgtgcacacatttccagccgtgctgcaaagcagcggcctgtactctctgtctagcgtggtcacagtgcctagctctagcctgggcacccagacctacatctgcaacgtgaaccacaagcctagcaacaccaaggtcgacaagagagtggaacccaagtcttgtggtggcggaggatctggcggaggcggatctgaagttcagcttgttgaatctggcggcggactggtgcaacctggcggatctctgaaactgtcttgtgccgcctccggcttcaccttcaatacctacgccatgaactgggttcgacaagcctccggcaaaggactggaatgggtcggacggatcagaagcaagtacaacaactacgccacctactacgccgactccgtgaaggacagattcaccatcagccgggacgactccaagagcaccctgtacctccagatgaactccctgaaaaccgaggacacagccgtctattattgcgtgcggcacggcaacttcggcaacagctatgtgtcttggtttgcctactggggacagggaaccctcgtgaccgtttcttcaggcggcggtggtagtggcggtggtggtagcggaggcggtggatcaggtggcggcggttctcaagctgtggtcacacaagagcccagcctgacagtttctcctggcggaaccgtgacactgacctgtagatctagcaccggcgcagtgaccaccagcaattacgctaactgggtgcagcagaagcccggccaagctcctagaggactgatcggaggcacaaacaagagagccccttggacaccagccagattttctggctctctgctgggcgataaggccgctcttacactgtctggcgcacagcctgaagatgaggccgagtacttttgcgccctgtggtacagcaacctgtgggtgttcggcggaggaacaaagctgacagttcttggaggcggcggaagcgacaagacccacacatgtcctccatgtcctgctccagaactgctcggcggaccctccgtgtttctgttccctccaaagccaaaggacaccctgatgatcagcagaacccctgaagtgacctgtgtggtggtggccgtgtctcacgaggacccagaagtgaagttcaattggtacgtggacggcgtggaagtgcacaacgccaagaccaagcctagagaggaacagtacgccagcacctacagagtggtgtctgtgctgacagtgctgcaccaggactggctgaacggcaaagagtacaagtgcaaggtgtccaacaaggccctggccgctcctatcgagaaaaccatctctaaggccaagggccagcctcgggaacctcaagtgtgcactcttccacctagccgggaagagatgaccaagaaccaggtgtcactgagctgcgccgtgaagggcttctacccttctgatatcgccgtggaatgggagagcaacggccagccagagaacaactacaagaccacacctcctgtgctggacagcgacggctcattcttcctggtgtctaagctgaccgtggacaagagcagatggcagcagggcaacgtgttcagctgttctgtgatgcacgaggccctgcacaaccactacacacagaagtccctgtctctgagccccggcaaa

SEQ ID NO: 1118 - protein, 326 aa, Artificial Sequence; identical to SEQ ID NO: 86
  source: /note="Description of Artificial Sequence: Synthetic polypeptide"

SEQ ID NO: 1119 - DNA, 978 bp, Artificial Sequence
  source: /note="Description of Artificial Sequence: Synthetic polynucleotide"
tctcagcagatctatggcgtggtgtacggcaacgtgaccttccacgtgccaagcaacgtgcccctgaaagaggtgctctggaagaaacagaaagacaaggtggccgagctggaaaacagcgagttcagagccttcagcagcttcaagaaccgggtgtacctggataccgtgtccggcagcctgaccatctacaatctgaccagcagcgacgaggacgagtacgagatggaaagccccaacatcaccgacaccatgaagttctttctgtacgtgctggaaagcggcggaggcggctctgataagacacacacatgtcctccatgtcctgctccagagctgctcggcggaccttctgttttcctgtttccacctaagccaaaggacaccctgatgatcagcagaacccctgaagtgacctgtgtggtggtggccgtgtctcacgaagatcccgaagtgaagttcaattggtacgtggacggcgtggaagtgcacaacgccaagaccaagcctagagaggaacagtacgccagcacctatagagtggtgtccgtgctgacagtgctgcaccaggactggctgaacggcaaagagtacaagtgcaaggtgtccaacaaggccctggccgctcctatcgagaaaaccatctctaaggccaagggccagcctcgggaaccacaggtttacaccctgcctccatgccgggaagagatgaccaagaatcaggtgtccctgtggtgcctggtcaagggcttctacccttccgatatcgccgtggaatgggagagcaatggccagcctgagaacaactacaagaccacacctcctgtgctggacagcgacggctcattcttcctgtacagcaagctgaccgtggacaagagcagatggcagcagggcaacgtgttcagctgttctgtgatgcacgaggccctgcacaaccactacacccagaagtctctgtctctgagccccggcaaa

SEQ ID NO: 1120 - protein, 719 aa, Artificial Sequence
  source: /note="Description of Artificial Sequence: Synthetic polypeptide"
QVQLVQSGAEVKKPGASVKVSCKASGYTFTTYWIQWVRQAPGQRLEWMGAVYPGDADTRYTQKFQGRVTLTADRSASTAYMELSSLRSEDTAVYYCGRDAGLEYYALDYWGQGTLVTVSSASTKGPSVFPLAPSSKSTSGGTAALGCLVKDYFPEPVTVSWNSGALTSGVHTFPAVLQSSGLYSLSSVVTVPSSSLGTQTYICNVNHKPSNTKVDKRVEPKSCGGGGSGGGGSEVQLVESGGGLVQPGGSLKLSCAASGFTFNTYAMNWVRQASGKGLEWVGRIRSKYNNYATYYADSVKDRFTISRDDSKSTLYLQMNSLKTEDTAVYYCVRHGNFGNSYVSWFAYWGQGTLVTVSSGGGGSGGGGSGGGGSGGGGSQAVVTQEPSLTVSPGGTVTLTCRSSTGAVTTSNYANWVQQKPGQAPRGLIGGTNKRAPWTPARFSGSLLGDKAALTLSGAQPEDEAEYFCALWYSNLWVFGGGTKLTVLGGGGSDKTHTCPPCPAPELLGAPSVFLFPPKPKDTLMISRTPEVTCVVVAVKHEDPEVKFNWYVDGVEVHNAKTKPREEQYNSTYRVVSVLTVLHQDWLNGKEYKCKVSNKALAAPIEKTISKAKGQPREPQVCTLPPSREEMTKNQVSLSCAVKGFYPSDIAVEWESNGQPENNYKTTPPVLDSDGSFFLVSKLTVDKSRWQQGNVFSCSVMHEALHNHYTQKSLSLSPGK

SEQ ID NO: 1121 - DNA, 2157 bp, Artificial Sequence
  source: /note="Description of Artificial Sequence: Synthetic polynucleotide"
caggttcaactggttcagagcggagccgaagtgaagaaacctggggccagcgtgaaggtgtcctgtaaagccagcggctacacctttaccacctactggattcagtgggtccgacaggcccctggacagagacttgaatggatgggagctgtgtaccccggcgacgccgataccagatacacccagaaattccagggcagagtgaccctgacagccgatagaagcgccagcacagcctacatggaactgagcagcctgagaagcgaggataccgccgtgtactactgtggcagagatgccggcctggaatattacgccctggactattggggccagggcaccctggttacagtgtcctctgcctctacaaagggcccctccgtttttccactggctcctagcagcaagagcacatctggtggaacagccgctctgggctgcctggtcaaggattactttcctgagcctgtgaccgtgtcctggaatagcggagcactgacaagcggcgtgcacacatttccagccgtgctgcaaagcagcggcctgtactctctgtctagcgtggtcacagtgcctagctctagcctgggcacccagacctacatctgcaacgtgaaccacaagcctagcaacaccaaggtcgacaagagagtggaacccaagtcttgtggtggcggaggatctggcggaggcggatctgaagttcagcttgttgaatctggcggcggactggtgcaacctggcggatctctgaaactgtcttgtgccgcctccggcttcaccttcaatacctacgccatgaactgggttcgacaagcctccggcaaaggactggaatgggtcggacggatcagaagcaagtacaacaactacgccacctactacgccgactccgtgaaggacagattcaccatcagccgggacgactccaagagcaccctgtacctccagatgaactccctgaaaaccgaggacacagccgtctattattgcgtgcggcacggcaacttcggcaacagctatgtgtcttggtttgcctactggggacagggaaccctcgtgaccgtttcttcaggcggcggtggtagtggcggtggtggtagcggaggcggtggatcaggtggcggcggttctcaagctgtggtcacacaagagcccagcctgacagtttctcctggcggaaccgtgacactgacctgtagatctagcaccggcgcagtgaccaccagcaattacgctaactgggtgcagcagaagcccggccaagctcctagaggactgatcggaggcacaaacaagagagccccttggacaccagccagattttctggctctctgctgggcgataaggccgctcttacactgtctggcgcacagcctgaagatgaggccgagtacttttgcgccctgtggtacagcaacctgtgggtgttcggcggaggaacaaagctgacagttcttggaggcggcggaagcgacaagacccacacatgtcctccatgtcctgctccagaactgctgggagcccctagcgttttcctgtttcctccaaagccaaaggacaccctgatgatcagcagaacccctgaagtgacctgtgtggtggtggccgtgaagcacgaggacccagaagtgaagttcaattggtacgtggacggcgtggaagtgcacaacgccaagaccaagcctagagaggaacagtacaacagcacctacagagtggtgtccgtgctgacagtgctgcaccaggactggctgaacggcaaagagtacaagtgcaaggtgtccaacaaggccctggccgctcctatcgagaaaaccatctctaaggccaagggccagcctcgggaacctcaagtgtgcactcttccacctagccgggaagagatgaccaagaaccaggtgtcactgagctgcgccgtgaagggcttctacccttctgatatcgccgtggaatgggagagcaacggccagccagagaacaactacaagaccacacctcctgtgctggacagcgacggctcattcttcctggtgtctaagctgaccgtggacaagagcagatggcagcagggcaacgtgttcagctgttctgtgatgcacgaggccctgcacaaccactacacacagaagtccctgtctctgagccccggcaaa

SEQ ID NO: 1122 - protein, 326 aa, Artificial Sequence
  source: /note="Description of Artificial Sequence: Synthetic polypeptide"
SQQIYGVVYGNVTFHVPSNVPLKEVLWKKQKDKVAELENSEFRAFSSFKNRVYLDTVSGSLTIYNLTSSDEDEYEMESPNITDTMKFFLYVLESGGGGSDKTHTCPPCPAPELLGAPSVFLFPPKPKDTLMISRTPEVTCVVVAVKHEDPEVKFNWYVDGVEVHNAKTKPREEQYNSTYRVVSVLTVLHQDWLNGKEYKCKVSNKALAAPIEKTISKAKGQPREPQVYTLPPCREEMTKNQVSLWCLVKGFYPSDIAVEWESNGQPENNYKTTPPVLDSDGSFFLYSKLTVDKSRWQQGNVFSCSVMHEALHNHYTQKSLSLSPGK

SEQ ID NO: 1123 - DNA, 978 bp, Artificial Sequence
  source: /note="Description of Artificial Sequence: Synthetic polynucleotide"
tctcagcagatctatggcgtggtgtacggcaacgtgaccttccacgtgccaagcaacgtgcccctgaaagaggtgctctggaagaaacagaaagacaaggtggccgagctggaaaacagcgagttcagagccttcagcagcttcaagaaccgggtgtacctggataccgtgtccggcagcctgaccatctacaatctgaccagcagcgacgaggacgagtacgagatggaaagccccaacatcaccgacaccatgaagttctttctgtacgtgctggaaagcggcggaggcggctctgataagacacacacatgtcctccatgtcctgctccagaactgctgggagcccctagcgttttcctgtttcctccaaagccaaaggacaccctgatgatcagcagaacccctgaagtgacctgtgtggtggtggccgtgaagcacgaagatcccgaagtgaagttcaattggtacgtggacggcgtggaagtgcacaacgccaagaccaagcctagagaggaacagtacaacagcacctacagagtggtgtccgtgctgaccgtgctgcaccaggattggctgaacggcaaagagtacaagtgcaaggtgtccaacaaggccctggccgctcctatcgagaaaaccatctctaaggccaagggccagcctcgggaaccacaggtttacaccctgcctccatgccgggaagagatgaccaagaatcaggtgtccctgtggtgcctggtcaagggcttctacccttccgatatcgccgtggaatgggagagcaatggccagcctgagaacaactacaagaccacacctcctgtgctggacagcgacggctcattcttcctgtacagcaagctgacagtggacaagagcagatggcagcagggcaacgtgttcagctgttctgtgatgcacgaggccctgcacaaccactacacccagaagtctctgtctctgagccccggcaaa

SEQ ID NO: 1124 - protein, 719 aa, Artificial Sequence
  source: /note="Description of Artificial Sequence: Synthetic polypeptide"
QVQLVQSGAEVKKPGASVKVSCKASGYTFTTYWIQWVRQAPGQRLEWMGAVYPGDADTRYTQKFQGRVTLTADRSASTAYMELSSLRSEDTAVYYCGRDAGLEYYALDYWGQGTLVTVSSASTKGPSVFPLAPSSKSTSGGTAALGCLVKDYFPEPVTVSWNSGALTSGVHTFPAVLQSSGLYSLSSVVTVPSSSLGTQTYICNVNHKPSNTKVDKRVEPKSCGGGGSGGGGSEVQLVESGGGLVQPGGSLKLSCAASGFTFNTYAMNWVRQASGKGLEWVGRIRSKYNNYATYYADSVKDRFTISRDDSKSTLYLQMNSLKTEDTAVYYCVRHGNFGNSYVSWFAYWGQGTLVTVSSGGGGSGGGGSGGGGSGGGGSQAVVTQEPSLTVSPGGTVTLTCRSSTGAVTTSNYANWVQQKPGQAPRGLIGGTNKRAPWTPARFSGSLLGDKAALTLSGAQPEDEAEYFCALWYSNLWVFGGGTKLTVLGGGGSDKTHTCPPCPAPEAAGGPSVFLFPPKPKDTLMISRTPEVTCVVVDVSHEDPEVKFNWYVDGVEVHNAKTKPREEQYNSTYRVVSVLTVLHQDWLNGKEYKCKVSNKALPAPIEKTISKAKGQPREPQVCTLPPSREEMTKNQVSLSCAVKGFYPSDIAVEWESNGQPENNYKTTPPVLDSDGSFFLVSKLTVDKSRWQQGNVFSCSVMHEALHNHYTQKSLSLSPGK

SEQ ID NO: 1125 - DNA, 2157 bp, Artificial Sequence
  source: /note="Description of Artificial Sequence: Synthetic polynucleotide"
caggttcaactggttcagagcggagccgaagtgaagaaacctggggccagcgtgaaggtgtcctgtaaagccagcggctacacctttaccacctactggattcagtgggtccgacaggcccctggacagagacttgaatggatgggagctgtgtaccccggcgacgccgataccagatacacccagaaattccagggcagagtgaccctgacagccgatagaagcgccagcacagcctacatggaactgagcagcctgagaagcgaggataccgccgtgtactactgtggcagagatgccggcctggaatattacgccctggactattggggccagggcaccctggttacagtgtcctctgcctctacaaagggcccctccgtttttccactggctcctagcagcaagagcacatctggtggaacagccgctctgggctgcctggtcaaggattactttcctgagcctgtgaccgtgtcctggaatagcggagcactgacaagcggcgtgcacacatttccagccgtgctgcaaagcagcggcctgtactctctgtctagcgtggtcacagtgcctagctctagcctgggcacccagacctacatctgcaacgtgaaccacaagcctagcaacaccaaggtcgacaagagagtggaacccaagtcttgtggtggcggaggatctggcggaggcggatctgaagttcagcttgttgaatctggcggcggactggtgcaacctggcggatctctgaaactgtcttgtgccgcctccggcttcaccttcaatacctacgccatgaactgggttcgacaagcctccggcaaaggactggaatgggtcggacggatcagaagcaagtacaacaactacgccacctactacgccgactccgtgaaggacagattcaccatcagccgggacgactccaagagcaccctgtacctccagatgaactccctgaaaaccgaggacacagccgtctattattgcgtgcggcacggcaacttcggcaacagctatgtgtcttggtttgcctactggggacagggaaccctcgtgaccgtttcttcaggcggcggtggtagtggcggtggtggtagcggaggcggtggatcaggtggcggcggttctcaagctgtggtcacacaagagcccagcctgacagtttctcctggcggaaccgtgacactgacctgtagatctagcaccggcgcagtgaccaccagcaattacgctaactgggtgcagcagaagcccggccaagctcctagaggactgatcggaggcacaaacaagagagccccttggacaccagccagattttctggctctctgctgggcgataaggccgctcttacactgtctggcgcacagcctgaagatgaggccgagtacttttgcgccctgtggtacagcaacctgtgggtgttcggcggaggaacaaagctgacagttcttggaggcggcggaagcgacaagacccacacatgtcctccatgtcctgctccagaagctgctggcggaccctccgtgtttctgttccctccaaagccaaaggacaccctgatgatcagcagaacccctgaagtgacctgcgtggtggtggatgtgtctcacgaggacccagaagtgaagttcaattggtacgtggacggcgtggaagtgcacaacgccaagaccaagcctagagaggaacagtacaacagcacctacagagtggtgtccgtgctgacagtgctgcaccaggactggctgaacggcaaagagtacaagtgcaaggtgtccaacaaggccctgcctgctcctatcgagaaaaccatcagcaaggccaagggccagcctagggaacctcaagtgtgcactctgcctccaagccgggaagagatgaccaagaatcaggtgtccctgagctgcgccgtgaagggcttttacccttccgatatcgccgtggaatgggagagcaatggccagccagagaacaactacaagaccacacctcctgtgctggacagcgacggctcattcttcctggtgtctaagctgaccgtggacaagagcagatggcagcagggcaacgtgttcagctgttctgtgatgcacgaggccctgcacaaccactacacacagaagtccctgtctctgagccccggcaaa

SEQ ID NO: 1126 - protein, 326 aa, Artificial Sequence
  source: /note="Description of Artificial Sequence: Synthetic polypeptide"
SQQIYGVVYGNVTFHVPSNVPLKEVLWKKQKDKVAELENSEFRAFSSFKNRVYLDTVSGSLTIYNLTSSDEDEYEMESPNITDTMKFFLYVLESGGGGSDKTHTCPPCPAPEAAGGPSVFLFPPKPKDTLMISRTPEVTCVVVDVSHEDPEVKFNWYVDGVEVHNAKTKPREEQYNSTYRVVSVLTVLHQDWLNGKEYKCKVSNKALPAPIEKTISKAKGQPREPQVYTLPPCREEMTKNQVSLWCLVKGFYPSDIAVEWESNGQPENNYKTTPPVLDSDGSFFLYSKLTVDKSRWQQGNVFSCSVMHEALHNHYTQKSLSLSPGK

SEQ ID NO: 1127 - protein, 719 aa, Artificial Sequence
  source: /note="Description of Artificial Sequence: Synthetic polypeptide"
QVQLVQSGAEVKKPGASVKVSCKASGYTFTTYWIQWVRQAPGQRLEWMGAVYPGDADTRYTQKFQGRVTLTADRSASTAYMELSSLRSEDTAVYYCGRDAGLEYYALDYWGQGTLVTVSSASTKGPSVFPLAPSSKSTSGGTAALGCLVKDYFPEPVTVSWNSGALTSGVHTFPAVLQSSGLYSLSSVVTVPSSSLGTQTYICNVNHKPSNTKVDKRVEPKSCGGGGSGGGGSEVQLVESGGGLVQPGGSLKLSCAASGFTFNTYAMNWVRQASGKGLEWVGRIRSKYNNYATYYADSVKDRFTISRDDSKSTLYLQMNSLKTEDTAVYYCVRHGNFGNSYVSWFAYWGQGTLVTVSSGGGGSGGGGSGGGGSGGGGSQAVVTQEPSLTVSPGGTVTLTCRSSTGAVTTSNYANWVQQKPGQAPRGLIGGTNKRAPWTPARFSGSLLGDKAALTLSGAQPEDEAEYFCALWYSNLWVFGGGTKLTVLGGGGSDKTHTCPPCPAPEAAGGPSVFLFPPKPKDTLMISRTPEVTCVVVDVKHEDPEVKFNWYVDGVEVHNAKTKPREEQYNSTYRVVSVLTVLHQDWLNGKEYKCKVSNKALAAPIEKTISKAKGQPREPQVCTLPPSREEMTKNQVSLSCAVKGFYPSDIAVEWESNGQPENNYKTTPPVLDSDGSFFLVSKLTVDKSRWQQGNVFSCSVMHEALHNHYTQKSLSLSPGK

SEQ ID NO: 1128 - DNA, 2157 bp, Artificial Sequence
  source: /note="Description of Artificial Sequence: Synthetic polynucleotide"
caggttcaactggttcagagcggagccgaagtgaagaaacctggggccagcgtgaaggtgtcctgtaaagccagcggctacacctttaccacctactggattcagtgggtccgacaggcccctggacagagacttgaatggatgggagctgtgtaccccggcgacgccgataccagatacacccagaaattccagggcagagtgaccctgacagccgatagaagcgccagcacagcctacatggaactgagcagcctgagaagcgaggataccgccgtgtactactgtggcagagatgccggcctggaatattacgccctggactattggggccagggcaccctggttacagtgtcctctgcctctacaaagggcccctccgtttttccactggctcctagcagcaagagcacatctggtggaacagccgctctgggctgcctggtcaaggattactttcctgagcctgtgaccgtgtcctggaatagcggagcactgacaagcggcgtgcacacatttccagccgtgctgcaaagcagcggcctgtactctctgtctagcgtggtcacagtgcctagctctagcctgggcacccagacctacatctgcaacgtgaaccacaagcctagcaacaccaaggtcgacaagagagtggaacccaagtcttgtggtggcggaggatctggcggaggcggatctgaagttcagcttgttgaatctggcggcggactggtgcaacctggcggatctctgaaactgtcttgtgccgcctccggcttcaccttcaatacctacgccatgaactgggttcgacaagcctccggcaaaggactggaatgggtcggacggatcagaagcaagtacaacaactacgccacctactacgccgactccgtgaaggacagattcaccatcagccgggacgactccaagagcaccctgtacctccagatgaactccctgaaaaccgaggacacagccgtctattattgcgtgcggcacggcaacttcggcaacagctatgtgtcttggtttgcctactggggacagggaaccctcgtgaccgtttcttcaggcggcggtggtagtggcggtggtggtagcggaggcggtggatcaggtggcggcggttctcaagctgtggtcacacaagagcccagcctgacagtttctcctggcggaaccgtgacactgacctgtagatctagcaccggcgcagtgaccaccagcaattacgctaactgggtgcagcagaagcccggccaagctcctagaggactgatcggaggcacaaacaagagagccccttggacaccagccagattttctggctctctgctgggcgataaggccgctcttacactgtctggcgcacagcctgaagatgaggccgagtacttttgcgccctgtggtacagcaacctgtgggtgttcggcggaggaacaaagctgacagttcttggaggcggcggaagcgacaagacccacacatgtcctccatgtcctgctccagaagctgctggcggaccctccgtgtttctgttccctccaaagccaaaggacaccctgatgatcagcagaacccctgaagtgacctgcgtggtggtggatgtgaagcacgaggacccagaagtgaagttcaattggtacgtggacggcgtggaagtgcacaacgccaagaccaagcctagagaggaacagtacaacagcacctacagagtggtgtccgtgctgacagtgctgcaccaggactggctgaacggcaaagagtacaagtgcaaggtgtccaacaaggccctggccgctcctatcgagaaaaccatctctaaggccaagggccagcctcgggaacctcaagtgtgcactcttccacctagccgggaagagatgaccaagaaccaggtgtcactgagctgcgccgtgaagggcttctacccttctgatatcgccgtggaatgggagagcaacggccagccagagaacaactacaagaccacacctcctgtgctggacagcgacggctcattcttcctggtgtctaagctgaccgtggacaagagcagatggcagcagggcaacgtgttcagctgtagcgtgatgcacgaggccctgcacaaccactacacacagaagtccctgtctctgagccccggcaaa

SEQ ID NO: 1129 - protein, 326 aa, Artificial Sequence
  source: /note="Description of Artificial Sequence: Synthetic polypeptide"
SQQIYGVVYGNVTFHVPSNVPLKEVLWKKQKDKVAELENSEFRAFSSFKNRVYLDTVSGSLTIYNLTSSDEDEYEMESPNITDTMKFFLYVLESGGGGSDKTHTCPPCPAPEAAGGPSVFLFPPKPKDTLMISRTPEVTCVVVDVKHEDPEVKFNWYVDGVEVHNAKTKPREEQYNSTYRVVSVLTVLHQDWLNGKEYKCKVSNKALAAPIEKTISKAKGQPREPQVYTLPPCREEMTKNQVSLWCLVKGFYPSDIAVEWESNGQPENNYKTTPPVLDSDGSFFLYSKLTVDKSRWQQGNVFSCSVMHEALHNHYTQKSLSLSPGK

SEQ ID NO: 1130 - DNA, 978 bp, Artificial Sequence
  source: /note="Description of Artificial Sequence: Synthetic polynucleotide"
tctcagcagatctatggcgtggtgtacggcaacgtgaccttccacgtgccaagcaacgtgcccctgaaagaggtgctctggaagaaacagaaagacaaggtggccgagctggaaaacagcgagttcagagccttcagcagcttcaagaaccgggtgtacctggataccgtgtccggcagcctgaccatctacaatctgaccagcagcgacgaggacgagtacgagatggaaagccccaacatcaccgacaccatgaagttctttctgtacgtgctggaaagcggcggaggcggctctgataagacacacacatgtcctccatgtcctgctccagaagcagctggcggaccctctgttttcctgtttccacctaagccaaaggacaccctgatgatcagcagaacccctgaagtgacctgcgtggtggtggatgtgaagcacgaggaccccgaagtgaagttcaattggtacgtggacggcgtggaagtgcacaacgccaagaccaagcctagagaggaacagtacaacagcacctacagagtggtgtccgtgctgaccgtgctgcaccaggattggctgaacggcaaagagtacaagtgcaaggtgtccaacaaggccctggccgctcctatcgagaaaaccatctctaaggccaagggccagcctcgggaaccacaggtttacaccctgcctccatgccgggaagagatgaccaagaatcaggtgtccctgtggtgcctggtcaagggcttctacccttccgatatcgccgtggaatgggagagcaatggccagcctgagaacaactacaagaccacacctcctgtgctggacagcgacggctcattcttcctgtacagcaagctgacagtggacaagagcagatggcagcagggcaacgtgttcagctgtagcgtgatgcacgaggccctgcacaaccactacacccagaagtctctgtctctgagccccggcaaa

SEQ ID NO: 1131 - protein, 719 aa, Artificial Sequence
  source: /note="Description of Artificial Sequence: Synthetic polypeptide"
QVQLVQSGAEVKKPGASVKVSCKASGYTFTTYWIQWVRQAPGQRLEWMGAVYPGDADTRYTQKFQGRVTLTADRSASTAYMELSSLRSEDTAVYYCGRDAGLEYYALDYWGQGTLVTVSSASTKGPSVFPLAPSSKSTSGGTAALGCLVKDYFPEPVTVSWNSGALTSGVHTFPAVLQSSGLYSLSSVVTVPSSSLGTQTYICNVNHKPSNTKVDKRVEPKSCGGGGSGGGGSEVQLVESGGGLVQPGGSLKLSCAASGFTFNTYAMNWVRQASGKGLEWVGRIRSKYNNYATYYADSVKDRFTISRDDSKSTLYLQMNSLKTEDTAVYYCVRHGNFGNSYVSWFAYWGQGTLVTVSSGGGGSGGGGSGGGGSGGGGSQAVVTQEPSLTVSPGGTVTLTCRSSTGAVTTSNYANWVQQKPGQAPRGLIGGTNKRAPWTPARFSGSLLGDKAALTLSGAQPEDEAEYFCALWYSNLWVFGGGTKLTVLGGGGSDKTHTCPPCPAPELLGGPSVFLFPPKPKDTLMISRTPEVTCVVVAVSHEDPEVKFNWYVDGVEVHNAKTKPREEQYASTYRVVSVLTVLHQDWLNGKEYKCKVSNKALAAPIEKTISKAKGQPREPQVYTLPPCREEMTKNQVSLWCLVKGFYPSDIAVEWESNGQPENNYKTTPPVLDSDGSFFLYSKLTVDKSRWQQGNVFSCSVMHEALHNHYTQKSLSLSPGK

SEQ ID NO: 1132 - protein, 215 aa, Artificial Sequence; identical to SEQ ID NO: 64
  source: /note="Description of Artificial Sequence: Synthetic polypeptide"

SEQ ID NO: 1133 - protein, 326 aa, Artificial Sequence
  source: /note="Description of Artificial Sequence: Synthetic polypeptide"
SQQIYGVVYGNVTFHVPSNVPLKEVLWKKQKDKVAELENSEFRAFSSFKNRVYLDTVSGSLTIYNLTSSDEDEYEMESPNITDTMKFFLYVLESGGGGSDKTHTCPPCPAPELLGGPSVFLFPPKPKDTLMISRTPEVTCVVVAVSHEDPEVKFNWYVDGVEVHNAKTKPREEQYASTYRVVSVLTVLHQDWLNGKEYKCKVSNKALAAPIEKTISKAKGQPREPQVCTLPPSREEMTKNQVSLSCAVKGFYPSDIAVEWESNGQPENNYKTTPPVLDSDGSFFLVSKLTVDKSRWQQGNVFSCSVMHEALHNHYTQKSLSLSPGK

SEQ ID NO: 1134 - protein, 719 aa, Artificial Sequence
  source: /note="Description of Artificial Sequence: Synthetic polypeptide"
QVQLVQSGAEVKKPGASVKVSCKASGYTFTTYWIQWVRQAPGQRLEWMGAVYPGDADTRYTQKFQGRVTLTADRSASTAYMELSSLRSEDTAVYYCGRDAGLEYYALDYWGQGTLVTVSSASTKGPSVFPLAPSSKSTSGGTAALGCLVKDYFPEPVTVSWNSGALTSGVHTFPAVLQSSGLYSLSSVVTVPSSSLGTQTYICNVNHKPSNTKVDKRVEPKSCGGGGSGGGGSEVQLVESGGGLVQPGGSLKLSCAASGFTFNTYAMNWVRQASGKGLEWVGRIRSKYNNYATYYADSVKDRFTISRDDSKSTLYLQMNSLKTEDTAVYYCVRHGNFGNSYVSWFAYWGQGTLVTVSSGGGGSGGGGSGGGGSGGGGSQAVVTQEPSLTVSPGGTVTLTCRSSTGAVTTSNYANWVQQKPGQAPRGLIGGTNKRAPWTPARFSGSLLGDKAALTLSGAQPEDEAEYFCALWYSNLWVFGGGTKLTVLGGGGSDKTHTCPPCPAPEAAGAPSVFLFPPKPKDTLMISRTPEVTCVVVDVSHEDPEVKFNWYVDGVEVHNAKTKPREEQYNSTYRVVSVLTVLHQDWLNGKEYKCKVSNKALPAPIEKTISKAKGQPREPQVCTLPPSREEMTKNQVSLSCAVKGFYPSDIAVEWESNGQPENNYKTTPPVLDSDGSFFLVSKLTVDKSRWQQGNVFSCSVMHEALHNHYTQKSLSLSPGK

SEQ ID NO: 1135 - protein, 326 aa, Artificial Sequence
  source: /note="Description of Artificial Sequence: Synthetic polypeptide"
SQQIYGVVYGNVTFHVPSNVPLKEVLWKKQKDKVAELENSEFRAFSSFKNRVYLDTVSGSLTIYNLTSSDEDEYEMESPNITDTMKFFLYVLESGGGGSDKTHTCPPCPAPEAAGAPSVFLFPPKPKDTLMISRTPEVTCVVVDVSHEDPEVKFNWYVDGVEVHNAKTKPREEQYNSTYRVVSVLTVLHQDWLNGKEYKCKVSNKALPAPIEKTISKAKGQPREPQVYTLPPCREEMTKNQVSLWCLVKGFYPSDIAVEWESNGQPENNYKTTPPVLDSDGSFFLYSKLTVDKSRWQQGNVFSCSVMHEALHNHYTQKSLSLSPGK

SEQ ID NO: 1136 - protein, 719 aa, Artificial Sequence
  source: /note="Description of Artificial Sequence: Synthetic polypeptide"
QVQLVQSGAEVKKPGASVKVSCKASGYTFTTYWIQWVRQAPGQRLEWMGAVYPGDADTRYTQKFQGRVTLTADRSASTAYMELSSLRSEDTAVYYCGRDAGLEYYALDYWGQGTLVTVSSASTKGPSVFPLAPSSKSTSGGTAALGCLVKDYFPEPVTVSWNSGALTSGVHTFPAVLQSSGLYSLSSVVTVPSSSLGTQTYICNVNHKPSNTKVDKRVEPKSCGGGGSGGGGSEVQLVESGGGLVQPGGSLKLSCAASGFTFNTYAMNWVRQASGKGLEWVGRIRSKYNNYATYYADSVKDRFTISRDDSKSTLYLQMNSLKTEDTAVYYCVRHGNFGNSYVSWFAYWGQGTLVTVSSGGGGSGGGGSGGGGSGGGGSQAVVTQEPSLTVSPGGTVTLTCRSSTGAVTTSNYANWVQQKPGQAPRGLIGGTNKRAPWTPARFSGSLLGDKAALTLSGAQPEDEAEYFCALWYSNLWVFGGGTKLTVLGGGGSDKTHTCPPCPAPELLGGPSVFLFPPKPKDTLMISRTPEVTCVVVAVKHEDPEVKFNWYVDGVEVHNAKTKPREEQYNSTYRVVSVLTVLHQDWLNGKEYKCKVSNKALAAPIEKTISKAKGQPREPQVCTLPPSREEMTKNQVSLSCAVKGFYPSDIAVEWESNGQPENNYKTTPPVLDSDGSFFLVSKLTVDKSRWQQGNVFSCSVMHEALHNHYTQKSLSLSPGK

SEQ ID NO: 1137 - protein, 326 aa, Artificial Sequence
  source: /note="Description of Artificial Sequence: Synthetic polypeptide"
SQQIYGVVYGNVTFHVPSNVPLKEVLWKKQKDKVAELENSEFRAFSSFKNRVYLDTVSGSLTIYNLTSSDEDEYEMESPNITDTMKFFLYVLESGGGGSDKTHTCPPCPAPELLGGPSVFLFPPKPKDTLMISRTPEVTCVVVAVKHEDPEVKFNWYVDGVEVHNAKTKPREEQYNSTYRVVSVLTVLHQDWLNGKEYKCKVSNKALAAPIEKTISKAKGQPREPQVYTLPPCREEMTKNQVSLWCLVKGFYPSDIAVEWESNGQPENNYKTTPPVLDSDGSFFLYSKLTVDKSRWQQGNVFSCSVMHEALHNHYTQKSLSLSPGK

SEQ ID NO: 1138 - protein, 719 aa, Artificial Sequence
  source: /note="Description of Artificial Sequence: Synthetic polypeptide"
QVQLVQSGAEVKKPGASVKVSCKASGYTFTTYWIQWVRQAPGQRLEWMGAVYPGDADTRYTQKFQGRVTLTADRSASTAYMELSSLRSEDTAVYYCGRDAGLEYYALDYWGQGTLVTVSSASTKGPSVFPLAPSSKSTSGGTAALGCLVKDYFPEPVTVSWNSGALTSGVHTFPAVLQSSGLYSLSSVVTVPSSSLGTQTYICNVNHKPSNTKVDKRVEPKSCGGGGSGGGGSEVQLVESGGGLVQPGGSLKLSCAASGFTFNTYAMNWVRQASGKGLEWVGRIRSKYNNYATYYADSVKDRFTISRDDSKSTLYLQMNSLKTEDTAVYYCVRHGNFGNSYVSWFAYWGQGTLVTVSSGGGGSGGGGSGGGGSGGGGSQAVVTQEPSLTVSPGGTVTLTCRSSTGAVTTSNYANWVQQKPGQAPRGLIGGTNKRAPWTPARFSGSLLGDKAALTLSGAQPEDEAEYFCALWYSNLWVFGGGTKLTVLGGGGSDKTHTCPPCPAPELLGAPSVFLFPPKPKDTLMISRTPEVTCVVVAVSHEDPEVKFNWYVDGVEVHNAKTKPREEQYNSTYRVVSVLTVLHQDWLNGKEYKCKVSNKALAAPIEKTISKAKGQPREPQVCTLPPSREEMTKNQVSLSCAVKGFYPSDIAVEWESNGQPENNYKTTPPVLDSDGSFFLVSKLTVDKSRWQQGNVFSCSVMHEALHNHYTQKSLSLSPGK

SEQ ID NO: 1139 - protein, 326 aa, Artificial Sequence
  source: /note="Description of Artificial Sequence: Synthetic polypeptide"
SQQIYGVVYGNVTFHVPSNVPLKEVLWKKQKDKVAELENSEFRAFSSFKNRVYLDTVSGSLTIYNLTSSDEDEYEMESPNITDTMKFFLYVLESGGGGSDKTHTCPPCPAPELLGAPSVFLFPPKPKDTLMISRTPEVTCVVVAVSHEDPEVKFNWYVDGVEVHNAKTKPREEQYNSTYRVVSVLTVLHQDWLNGKEYKCKVSNKALAAPIEKTISKAKGQPREPQVYTLPPCREEMTKNQVSLWCLVKGFYPSDIAVEWESNGQPENNYKTTPPVLDSDGSFFLYSKLTVDKSRWQQGNVFSCSVMHEALHNHYTQKSLSLSPGK

SEQ ID NO: 1140 - protein, 719 aa, Artificial Sequence
  source: /note="Description of Artificial Sequence: Synthetic polypeptide"
QVQLVQSGAEVKKPGASVKVSCKASGYTFTTYWIQWVRQAPGQRLEWMGAVYPGDADTRYTQKFQGRVTLTADRSASTAYMELSSLRSEDTAVYYCGRDAGLEYYALDYWGQGTLVTVSSASTKGPSVFPLAPSSKSTSGGTAALGCLVKDYFPEPVTVSWNSGALTSGVHTFPAVLQSSGLYSLSSVVTVPSSSLGTQTYICNVNHKPSNTKVDKRVEPKSCGGGGSGGGGSEVQLVESGGGLVQPGGSLKLSCAASGFTFNTYAMNWVRQASGKGLEWVGRIRSKYNNYATYYADSVKDRFTISRDDSKSTLYLQMNSLKTEDTAVYYCVRHGNFGNSYVSWFAYWGQGTLVTVSSGGGGSGGGGSGGGGSGGGGSQAVVTQEPSLTVSPGGTVTLTCRSSTGAVTTSNYANWVQQKPGQAPRGLIGGTNKRAPWTPARFSGSLLGDKAALTLSGAQPEDEAEYFCALWYSNLWVFGGGTKLTVLGGGGSDKTHTCPPCPAPEAAGGPSVFLFPPKPKDTLMISRTPEVTCVVVDVSHEDPEVKFNWYVDGVEVHNAKTKPREEQYNSTYRVVSVLTVLHQDWLNGKEYKCKVSNKALGAPIEKTISKAKGQPREPQVCTLPPSREEMTKNQVSLSCAVKGFYPSDIAVEWESNGQPENNYKTTPPVLDSDGSFFLVSKLTVDKSRWQQGNVFSCSVMHEALHNHYTQKSLSLSPGK

SEQ ID NO: 1141 - protein, 326 aa, Artificial Sequence
  source: /note="Description of Artificial Sequence: Synthetic polypeptide"
SQQIYGVVYGNVTFHVPSNVPLKEVLWKKQKDKVAELENSEFRAFSSFKNRVYLDTVSGSLTIYNLTSSDEDEYEMESPNITDTMKFFLYVLESGGGGSDKTHTCPPCPAPEAAGGPSVFLFPPKPKDTLMISRTPEVTCVVVDVSHEDPEVKFNWYVDGVEVHNAKTKPREEQYNSTYRVVSVLTVLHQDWLNGKEYKCKVSNKALGAPIEKTISKAKGQPREPQVYTLPPCREEMTKNQVSLWCLVKGFYPSDIAVEWESNGQPENNYKTTPPVLDSDGSFFLYSKLTVDKSRWQQGNVFSCSVMHEALHNHYTQKSLSLSPGK

SEQ ID NO: 1142 - protein, 719 aa, Artificial Sequence
  source: /note="Description of Artificial Sequence: Synthetic polypeptide"
QVQLVQSGAEVKKPGASVKVSCKASGYTFTTYWIQWVRQAPGQRLEWMGAVYPGDADTRYTQKFQGRVTLTADRSASTAYMELSSLRSEDTAVYYCGRDAGLEYYALDYWGQGTLVTVSSASTKGPSVFPLAPSSKSTSGGTAALGCLVKDYFPEPVTVSWNSGALTSGVHTFPAVLQSSGLYSLSSVVTVPSSSLGTQTYICNVNHKPSNTKVDKRVEPKSCGGGGSGGGGSEVQLVESGGGLVQPGGSLKLSCAASGFTFNTYAMNWVRQASGKGLEWVGRIRSKYNNYATYYADSVKDRFTISRDDSKSTLYLQMNSLKTEDTAVYYCVRHGNFGNSYVSWFAYWGQGTLVTVSSGGGGSGGGGSGGGGSGGGGSQAVVTQEPSLTVSPGGTVTLTCRSSTGAVTTSNYANWVQQKPGQAPRGLIGGTNKRAPWTPARFSGSLLGDKAALTLSGAQPEDEAEYFCALWYSNLWVFGGGTKLTVLGGGGSDKTHTCPPCPAPEAAGGPSVFLFPPKPKDTLMISRTPEVTCVVVDVSHEDPEVKFNWYVDGVEVHNAKTKPREEQYNSTYRVVSVLTVLHQDWLNGKEYKCKVSNKALAAPIEKTISKAKGQPREPQVCTLPPSREEMTKNQVSLSCAVKGFYPSDIAVEWESNGQPENNYKTTPPVLDSDGSFFLVSKLTVDKSRWQQGNVFSCSVMHEALHNHYTQKSLSLSPGK

SEQ ID NO: 1143 - protein, 326 aa, Artificial Sequence
  source: /note="Description of Artificial Sequence: Synthetic polypeptide"
SQQIYGVVYGNVTFHVPSNVPLKEVLWKKQKDKVAELENSEFRAFSSFKNRVYLDTVSGSLTIYNLTSSDEDEYEMESPNITDTMKFFLYVLESGGGGSDKTHTCPPCPAPEAAGGPSVFLFPPKPKDTLMISRTPEVTCVVVDVSHEDPEVKFNWYVDGVEVHNAKTKPREEQYNSTYRVVSVLTVLHQDWLNGKEYKCKVSNKALAAPIEKTISKAKGQPREPQVYTLPPCREEMTKNQVSLWCLVKGFYPSDIAVEWESNGQPENNYKTTPPVLDSDGSFFLYSKLTVDKSRWQQGNVFSCSVMHEALHNHYTQKSLSLSPGK

SEQ ID NO: 1144 - DNA, 1184 bp, Artificial Sequence
  source: /note="Description of Artificial Sequence: Synthetic polynucleotide"
cgtgaggctccggtgcccgtcagtgggcagagcgcacatcgcccacagtccccgagaagttggggggaggggtcggcaattgaaccggtgcctagagaaggtggcgcggggtaaactgggaaagtgatgtcgtgtactggctccgcctttttcccgagggtgggggagaaccgtatataagtgcagtagtcgccgtgaacgttctttttcgcaacgggtttgccgccagaacacaggtaagtgccgtgtgtggttcccgcgggcctggcctctttacgggttatggcccttgcgtgccttgaattacttccacctggctgcagtacgtgattcttgatcccgagcttcgggttggaagtgggtgggagagttcgaggccttgcgcttaaggagccccttcgcctcgtgcttgagttgaggcctggcctgggcgctggggccgccgcgtgcgaatctggtggcaccttcgcgcctgtctcgctgctttcgataagtctctagccatttaaaatttttgatgacctgctgcgacgctttttttctggcaagatagtcttgtaaatgcgggccaagatctgcacactggtatttcggtttttggggccgcgggcggcgacggggcccgtgcgtcccagcgcacatgttcggcgaggcggggcctgcgagcgcggccaccgagaatcggacgggggtagtctcaagctggccggcctgctctggtgcctggcctcgcgccgccgtgtatcgccccgccctgggcggcaaggctggcccggtcggcaccagttgcgtgagcggaaagatggccgcttcccggccctgctgcagggagctcaaaatggaggacgcggcgctcgggagagcgggcgggtgagtcacccacacaaaggaaaagggcctttccgtcctcagccgtcgcttcatgtgactccacggagtaccgggcgccgtccaggcacctcgattagttctcgagcttttggagtacgtcgtctttaggttggggggaggggttttatgcgatggagtttccccacactgagtgggtggagactgaagttaggccagcttggcacttgatgtaattctccttggaatttgccctttttgagtttggatcttggttcattctcaagcctcagacagtggttcaaagtttttttcttccatttcaggtgtcgtga

SEQ ID NO: 1145 - protein, 21 aa, Artificial Sequence
  source: /note="Description of Artificial Sequence: Synthetic peptide"
MALPVTALLLPLALLLHAARP

SEQ ID NO: 1146 - DNA, 63 bp, Artificial Sequence
  source: /note="Description of Artificial Sequence: Synthetic oligonucleotide"
atggccctgcctgtgacagccctgctgctgcctctggctctgctgctgcatgccgctagaccc

SEQ ID NO: 1147 - DNA, 63 bp, Artificial Sequence
  source: /note="Description of Artificial Sequence: Synthetic oligonucleotide"
atggccctccctgtcaccgccctgctgcttccgctggctcttctgctccacgccgctcggccc

SEQ ID NO: 1148 - protein, 45 aa, Artificial Sequence
  source: /note="Description of Artificial Sequence: Synthetic polypeptide"
TTTPAPRPPTPAPTIASQPLSLRPEACRPAAGGAVHTRGLDFACD

SEQ ID NO: 1149 - DNA, 135 bp, Artificial Sequence
  source: /note="Description of Artificial Sequence: Synthetic polynucleotide"
accacgacgccagcgccgcgaccaccaacaccggcgcccaccatcgcgtcgcagcccctgtccctgcgcccagaggcgtgccggccagcggcggggggcgcagtgcacacgagggggctggacttcgcctgtgat

SEQ ID NO: 1150 - protein, 230 aa, Artificial Sequence
  source: /note="Description of Artificial Sequence: Synthetic polypeptide"
ESKYGPPCPPCPAPEFLGGPSVFLFPPKPKDTLMISRTPEVTCVVVDVSQEDPEVQFNWYVDGVEVHNAKTKPREEQFNSTYRVVSVLTVLHQDWLNGKEYKCKVSNKGLPSSIEKTISKAKGQPREPQVYTLPPSQEEMTKNQVSLTCLVKGFYPSDIAVEWESNGQPENNYKTTPPVLDSDGSFFLYSRLTVDKSRWQEGNVFSCSVMHEALHNHYTQKSLSLSLGKM

SEQ ID NO: 1151 - DNA, 690 bp, Artificial Sequence
  source: /note="Description of Artificial Sequence: Synthetic polynucleotide"
gagagcaagtacggccctccctgccccccttgccctgcccccgagttcctgggcggacccagcgtgttcctgttcccccccaagcccaaggacaccctgatgatcagccggacccccgaggtgacctgtgtggtggtggacgtgtcccaggaggaccccgaggtccagttcaactggtacgtggacggcgtggaggtgcacaacgccaagaccaagccccgggaggagcagttcaatagcacctaccgggtggtgtccgtgctgaccgtgctgcaccaggactggctgaacggcaaggaatacaagtgtaaggtgtccaacaagggcctgcccagcagcatcgagaaaaccatcagcaaggccaagggccagcctcgggagccccaggtgtacaccctgccccctagccaagaggagatgaccaagaaccaggtgtccctgacctgcctggtgaagggcttctaccccagcgacatcgccgtggagtgggagagcaacggccagcccgagaacaactacaagaccaccccccctgtgctggacagcgacggcagcttcttcctgtacagccggctgaccgtggacaagagccggtggcaggagggcaacgtctttagctgctccgtgatgcacgaggccctgcacaaccactacacccagaagagcctgagcctgtccctgggcaagatg

SEQ ID NO: 1152 - protein, 282 aa, Artificial Sequence
  source: /note="Description of Artificial Sequence: Synthetic polypeptide"
RWPESPKAQASSVPTAQPQAEGSLAKATTAPATTRNTGRGGEEKKKEKEKEEQEERETKTPECPSHTQPLGVYLLTPAVQDLWLRDKATFTCFVVGSDLKDAHLTWEVAGKVPTGGVEEGLLERHSNGSQSQHSRLTLPRSLWNAGTSVTCTLNHPSLPPQRLMALREPAAQAPVKLSLNLLASSDPPEAASWLLCEVSGFSPPNILLMWLEDQREVNTSGFAPARPPPQPGSTTFWAWSVLRVPAPPSPQPATYTCVVSHEDSRTLLNASRSLEVSYVTDH

SEQ ID NO: 1153 - DNA, 847 bp, Artificial Sequence
  source: /note="Description of Artificial Sequence: Synthetic polynucleotide"
aggtggcccgaaagtcccaaggcccaggcatctagtgttcctactgcacagccccaggcagaaggcagcctagccaaagctactactgcacctgccactacgcgcaatactggccgtggcggggaggagaagaaaaaggagaaagagaaagaagaacaggaagagagggagaccaagacccctgaatgtccatcccatacccagccgctgggcgtctatctcttgactcccgcagtacaggacttgtggcttagagataaggccacctttacatgtttcgtcgtgggctctgacctgaaggatgcccatttgacttgggaggttgccggaaaggtacccacagggggggttgaggaagggttgctggagcgccattccaatggctctcagagccagcactcaagactcacccttccgagatccctgtggaacgccgggacctctgtcacatgtactctaaatcatcctagcctgcccccacagcgtctgatggcccttagagagccagccgcccaggcaccagttaagcttagcctgaatctgctcgccagtagtgatcccccagaggccgccagctggctcttatgcgaagtgtccggctttagcccgcccaacatcttgctcatgtggctggaggaccagcgagaagtgaacaccagcggcttcgctccagcccggcccccaccccagccgggttctaccacattctgggcctggagtgtcttaagggtcccagcaccacctagcccccagccagccacatacacctgtgttgtgtcccatgaagatagcaggaccctgctaaatgcttctaggagtctggaggtttcctacgtgactgaccatt

SEQ ID NO: 1154 - protein, 24 aa, Artificial Sequence
  source: /note="Description of Artificial Sequence: Synthetic peptide"
IYIWAPLAGTCGVLLLSLVITLYC

SEQ ID NO: 1155 - DNA, 72 bp, Artificial Sequence
  source: /note="Description of Artificial Sequence: Synthetic oligonucleotide"
atctacatctgggcgcccttggccgggacttgtggggtccttctcctgtcactggttatcaccctttactgc

SEQ ID NO: 1156 - protein, 42 aa, Artificial Sequence
  source: /note="Description of Artificial Sequence: Synthetic polypeptide"
KRGRKKLLYIFKQPFMRPVQTTQEEDGCSCRFPEEEEGGCEL

SEQ ID NO: 1157 - DNA, 126 bp, Artificial Sequence
  source: /note="Description of Artificial Sequence: Synthetic polynucleotide"
aaacggggcagaaagaaactcctgtatatattcaaacaaccatttatgagaccagtacaaactactcaagaggaagatggctgtagctgccgatttccagaagaagaagaaggaggatgtgaactg

SEQ ID NO: 1158 - protein, 48 aa, Artificial Sequence
  source: /note="Description of Artificial Sequence: Synthetic polypeptide"
QRRKYRSNKGESPVEPAEPCRYSCPREEEGSTIPIQEDYRKPEPACSP

SEQ ID NO: 1159 - DNA, 123 bp, Artificial Sequence
  source: /note="Description of Artificial Sequence: Synthetic polynucleotide"
aggagtaagaggagcaggctcctgcacagtgactacatgaacatgactccccgccgccccgggcccacccgcaagcattaccagccctatgccccaccacgcgacttcgcagcctatcgctcc

SEQ ID NO: 1160 - protein, 112 aa, Artificial Sequence
  source: /note="Description of Artificial Sequence: Synthetic polypeptide"
RVKFSRSADAPAYKQGQNQLYNELNLGRREEYDVLDKRRGRDPEMGGKPRRKNPQEGLYNELQKDKMAEAYSEIGMKGERRRGKGHDGLYQGLSTATKDTYDALHMQALPPR

SEQ ID NO: 1161 - DNA, 336 bp, Artificial Sequence
  source: /note="Description of Artificial Sequence: Synthetic polynucleotide"
agagtgaagttcagcaggagcgcagacgcccccgcgtacaagcagggccagaaccagctctataacgagctcaatctaggacgaagagaggagtacgatgttttggacaagagacgtggccgggaccctgagatggggggaaagccgagaaggaagaaccctcaggaaggcctgtacaatgaactgcagaaagataagatggcggaggcctacagtgagattgggatgaaaggcgagcgccggaggggcaaggggcacgatggcctttaccagggtctcagtacagccaccaaggacacctacgacgcccttcacatgcaggccctgccccctcgc

SEQ ID NO: 1162 - protein, 112 aa, Artificial Sequence
  source: /note="Description of Artificial Sequence: Synthetic polypeptide"
RVKFSRSADAPAYQQGQNQLYNELNLGRREEYDVLDKRRGRDPEMGGKPRRKNPQEGLYNELQKDKMAEAYSEIGMKGERRRGKGHDGLYQGLSTATKDTYDALHMQALPPR

SEQ ID NO: 1163 - DNA, 336 bp, Artificial Sequence
  source: /note="Description of Artificial Sequence: Synthetic polynucleotide"
agagtgaagttcagcaggagcgcagacgcccccgcgtaccagcagggccagaaccagctctataacgagctcaatctaggacgaagagaggagtacgatgttttggacaagagacgtggccgggaccctgagatggggggaaagccgagaaggaagaaccctcaggaaggcctgtacaatgaactgcagaaagataagatggcggaggcctacagtgagattgggatgaaaggcgagcgccggaggggcaaggggcacgatggcctttaccagggtctcagtacagccaccaaggacacctacgacgcccttcacatgcaggccctgccccctcgc

SEQ ID NO: 1164 - protein, 41 aa, Artificial Sequence
  source: /note="Description of Artificial Sequence: Synthetic polypeptide"
RSKRSRLLHSDYMNMTPRRPGPTRKHYQPYAPPRDFAAYRS

SEQ ID NO: 1165 - DNA, 123 bp, Artificial Sequence; identical to SEQ ID NO: 1159
  source: /note="Description of Artificial Sequence: Synthetic polynucleotide"

SEQ ID NO: 1166 - protein, 35 aa, Artificial Sequence
  source: /note="Description of Artificial Sequence: Synthetic polypeptide"
TKKKYSSSVHDPNGEYMFMRAVNTAKKSRLTDVTL

SEQ ID NO: 1167 - DNA, 105 bp, Artificial Sequence
  source: /note="Description of Artificial Sequence: Synthetic polynucleotide"
acaaaaaagaagtattcatccagtgtgcacgaccctaacggtgaatacatgttcatgagagcagtgaacacagccaaaaaatccagactcacagatgtgacccta

SEQ ID NO: 1168 - protein, 10 aa, Artificial Sequence
  source: /note="Description of Artificial Sequence: Synthetic peptide"
GGGGSGGGGS

SEQ ID NO: 1169 - DNA, 30 bp, Artificial Sequence; identical to SEQ ID NO: 141
  source: /note="Description of Artificial Sequence: Synthetic oligonucleotide"

SEQ ID NO: 1170 - DNA, 30 bp, Artificial Sequence
  source: /note="Description of Artificial Sequence: Synthetic oligonucleotide"
ggtggcggaggttctggaggtgggggttcc

SEQ ID NO: 1171 - protein, 5 aa, Artificial Sequence
  source: /note="Description of Artificial Sequence: Synthetic peptide"
  source: /note="See specification as filed for detailed description of substitutions and preferred embodiments"
GGGGS

SEQ ID NO: 1172 - protein, 30 aa, Artificial Sequence; identical to SEQ ID NO: 144
  source: /note="Description of Artificial Sequence: Synthetic polypeptide"
  SITE (1)..(30): /note="This sequence may encompass 1-6 'Gly Gly Gly Gly Ser' repeating units"

SEQ ID NO: 1173 - protein, 20 aa, Artificial Sequence
  source: /note="Description of Artificial Sequence: Synthetic peptide"
GGGGSGGGGSGGGGSGGGGS

SEQ ID NO: 1174 - protein, 15 aa, Artificial Sequence
  source: /note="Description of Artificial Sequence: Synthetic peptide"
GGGGSGGGGSGGGGS

SEQ ID NO: 1175 - protein, 4 aa, Artificial Sequence
  source: /note="Description of Artificial Sequence: Synthetic peptide"
GGGS

SEQ ID NO: 1176 - protein, 4 aa, Artificial Sequence
  source: /note="Description of Artificial Sequence: Synthetic peptide"
  source: /note="See specification as filed for detailed description of substitutions and preferred embodiments"
GGGS

SEQ ID NO: 1177 - protein, 40 aa, Artificial Sequence
  source: /note="Description of Artificial Sequence: Synthetic polypeptide"
  SITE (1)..(40): /note="This sequence may encompass 1-10 'Gly Gly Gly Ser' repeating units"
GGGSGGGSGGGSGGGSGGGSGGGSGGGSGGGSGGGSGGGS

SEQ ID NO: 1178 - protein, 18 aa, Artificial Sequence
  source: /note="Description of Artificial Sequence: Synthetic peptide"
GSTSGSGKPGSGEGSTKG

SEQ ID NO: 1179 - protein, 4 aa, Artificial Sequence
  source: /note="Description of Artificial Sequence: Synthetic peptide"
CPPC

SEQ ID NO: 1180 - protein, 4 aa, Artificial Sequence
  source: /note="Description of Artificial Sequence: Synthetic peptide"
SPPS

SEQ ID NO: 1181 - protein, 19 aa, Homo sapiens
VPSTPPTPSPSTPPTPSPS

SEQ ID NO: 1182 - protein, 6 aa, Homo sapiens
VPPPPP

SEQ ID NO: 1183 - protein, 58 aa, Homo sapiens
ESPKAQASSVPTAQPQAEGSLAKATTAPATTRNTGRGGEEKKKEKEKEEQEERETKTP

SEQ ID NO: 1184 - protein, 15 aa, Homo sapiens
EPKSCDKTHTCPPCP

SEQ ID NO: 1185 - protein, 12 aa, Homo sapiens
ERKCCVECPPCP

SEQ ID NO: 1186 - protein, 62 aa, Homo sapiens
ELKTPLGDTTHTCPRCPEPKSCDTPPPCPRCPEPKSCDTPPPCPRCPEPKSCDTPPPCPRCP

SEQ ID NO: 1187 - protein, 12 aa, Homo sapiens
ESKYGPPCPSCP

SEQ ID NO: 1188 - protein, 12 aa, Homo sapiens
ESKYGPPCPPCP

SEQ ID NO: 1189 - protein, 4 aa, Artificial Sequence
  source: /note="Description of Artificial Sequence: Synthetic peptide"
CPSC

SEQ ID NO: 1190 - protein, 4 aa, Artificial Sequence
  source: /note="Description of Artificial Sequence: Synthetic peptide"
CPRC

SEQ ID NO: 1191 - protein, 4 aa, Artificial Sequence
  source: /note="Description of Artificial Sequence: Synthetic peptide"
SPPC

SEQ ID NO: 1192 - protein, 4 aa, Artificial Sequence
  source: /note="Description of Artificial Sequence: Synthetic peptide"
CPPS

SEQ ID NO: 1193 - protein, 8 aa, Artificial Sequence
  source: /note="Description of Artificial Sequence: Synthetic peptide"
DKTHTCAA

SEQ ID NO: 1194 - protein, 11 aa, Artificial Sequence
  source: /note="Description of Artificial Sequence: Synthetic peptide"
DKTHTCPPCPA

SEQ ID NO: 1195 - protein, 18 aa, Artificial Sequence
  source: /note="Description of Artificial Sequence: Synthetic peptide"
DKTHTCPPCPATCPPCPA

SEQ ID NO: 1196 - protein, 25 aa, Artificial Sequence
  source: /note="Description of Artificial Sequence: Synthetic peptide"
DKTHTCPPCPATCPPCPATCPPCPA

SEQ ID NO: 1197 - protein, 30 aa, Artificial Sequence
  source: /note="Description of Artificial Sequence: Synthetic polypeptide"
DKTHTCPPCPAGKPTLYNSLVMSDTAGTCY

SEQ ID NO: 1198 - protein, 31 aa, Artificial Sequence
  source: /note="Description of Artificial Sequence: Synthetic polypeptide"
DKTHTCPPCPAGKPTHVNVSVVMAEVDGTCY

SEQ ID NO: 1199 - protein, 15 aa, Artificial Sequence
  source: /note="Description of Artificial Sequence: Synthetic peptide"
DKTHTCCVECPPCPA

SEQ ID NO: 1200 - protein, 26 aa, Artificial Sequence
  source: /note="Description of Artificial Sequence: Synthetic peptide"
DKTHTCPRCPEPKSCDTPPPCPRCPA

SEQ ID NO: 1201 - protein, 11 aa, Artificial Sequence
  source: /note="Description of Artificial Sequence: Synthetic peptide"
DKTHTCPSCPA

SEQ ID NO: 1202 - protein, 5 aa, Artificial Sequence
  source: /note="Description of Artificial Sequence: Synthetic peptide"
ADAAP

SEQ ID NO: 1203 - protein, 11 aa, Artificial Sequence
  source: /note="Description of Artificial Sequence: Synthetic peptide"
ADAAPTVSIFP

SEQ ID NO: 1204 - protein, 12 aa, Artificial Sequence
  source: /note="Description of Artificial Sequence: Synthetic peptide"
ADAAPTVSIFPP

SEQ ID NO: 1205 - protein, 6 aa, Artificial Sequence
  source: /note="Description of Artificial Sequence: Synthetic peptide"
AKTTAP

SEQ ID NO: 1206 - protein, 13 aa, Artificial Sequence
  source: /note="Description of Artificial Sequence: Synthetic peptide"
AKTTAPSVYPLAP

SEQ ID NO: 1207 - protein, 17 aa, Artificial Sequence
  source: /note="Description of Artificial Sequence: Synthetic peptide"
AKTTPKLEEGEFSEARV

SEQ ID NO: 1208 - protein, 9 aa, Artificial Sequence
  source: /note="Description of Artificial Sequence: Synthetic peptide"
AKTTPKLGG

SEQ ID NO: 1209 - protein, 6 aa, Artificial Sequence
  source: /note="Description of Artificial Sequence: Synthetic peptide"
AKTTPP

SEQ ID NO: 1210 - protein, 13 aa, Artificial Sequence
  source: /note="Description of Artificial Sequence: Synthetic peptide"
AKTTPPSVTPLAP

SEQ ID NO: 1211 - protein, 6 aa, Artificial Sequence
  source: /note="Description of Artificial Sequence: Synthetic peptide"
ASTKGP

SEQ ID NO: 1212 - protein, 13 aa, Artificial Sequence
  source: /note="Description of Artificial Sequence: Synthetic peptide"
ASTKGPSVFPLAP

SEQ ID NO: 1213 - protein, 26 aa, Artificial Sequence
  source: /note="Description of Artificial Sequence: Synthetic peptide"
ASTKGPSVFPLAPASTKGPSVFPLAP

SEQ ID NO: 1214 - protein, 14 aa, Artificial Sequence
  source: /note="Description of Artificial Sequence: Synthetic peptide"
EGKSSGSGSESKST

SEQ ID NO: 1215 - protein, 15 aa, Artificial Sequence
  source: /note="Description of Artificial Sequence: Synthetic peptide"
GEGESGEGESGEGES

SEQ ID NO: 1216 - protein, 112 aa, Artificial Sequence
  source: /note="Description of Artificial Sequence: Synthetic polypeptide"
DVVLTQTPPTLLATIGQSVSISCRSSQSLLHSSGNTYLNWLLQRTGQSPQPLIYLVSKLESGVPNRFSGSGSGTDFTLKISGVEAEDLGVYYCMQFTHYPYTFGAGTKLELK

SEQ ID NO: 1217 - protein, 20 aa, Artificial Sequence
  source: /note="Description of Artificial Sequence: Synthetic peptide"
GEGESGEGESGEGESGEGES

SEQ ID NO: 1218 - protein, 15 aa, Artificial Sequence
  source: /note="Description of Artificial Sequence: Synthetic peptide"
GEGGSGEGGSGEGGS

SEQ ID NO: 1219 - protein, 15 aa, Artificial Sequence
  source: /note="Description of Artificial Sequence: Synthetic peptide"
GENKVEYAPALMALS

SEQ ID NO: 1220 - protein, 15 aa, Artificial Sequence
  source: /note="Description of Artificial Sequence: Synthetic peptide"
GGEGSGGEGSGGEGS

SEQ ID NO: 1221 - protein, 112 aa, Artificial Sequence
  source: /note="Description of Artificial Sequence: Synthetic polypeptide"
DVVMTQSPPSLLVTLGQPASISCRSSQSLLHSSGNTYLNWLLQRPGQSPQPLIYLVSKLESGVPDRFSGSGSGTDFTLKISGVEAEDVGVYYCMQFTHYPYTFGQGTKLEIK

SEQ ID NO: 1222 - protein, 15 aa, Artificial Sequence
  source: /note="Description of Artificial Sequence: Synthetic peptide"
GGGESGGEGSGEGGS

SEQ ID NO: 1223 - protein, 15 aa, Artificial Sequence
  source: /note="Description of Artificial Sequence: Synthetic peptide"
GGGESGGGESGGGES

SEQ ID NO: 1224 - protein, 50 aa, Artificial Sequence
  source: /note="Description of Artificial Sequence: Synthetic polypeptide"
  SITE (1)..(50): /note="This sequence may encompass 1-10 'Gly Gly Gly Gly Ser' repeating units"
GGGGSGGGGSGGGGSGGGGSGGGGSGGGGSGGGGSGGGGSGGGGSGGGGS

SEQ ID NO: 1225 - protein, 118 aa, Artificial Sequence
  source: /note="Description of Artificial Sequence: Synthetic polypeptide"
EVQLQQSGPELQRPGASVKLSCKASGYIFTEYYMYWVKQRPKQGLELVGRIDPEDGSIDYVEKFKKKATLTADTSSNTAYMQLSSLTSEDTATYFCARGKFNYRFAYWGQGTLVTVSS

SEQ ID NO: 1226 - protein, 118 aa, Artificial Sequence
  source: /note="Description of Artificial Sequence: Synthetic polypeptide"
QVQLVQSGAEVKKPGASVKVSCKASGYTFTEYYMYWVRQAPGQGLELMGRIDPEDGSIDYVEKFKKKVTLTADTSSSTAYMELSSLTSDDTAVYYCARGKFNYRFAYWGQGTLVTVSS

SEQ ID NO: 1227 - protein, 15 aa, Artificial Sequence
  source: /note="Description of Artificial Sequence: Synthetic peptide"
GGGKSGGGKSGGGKS

SEQ ID NO: 1228 - protein, 15 aa, Artificial Sequence
  source: /note="Description of Artificial Sequence: Synthetic peptide"
GGGKSGGKGSGKGGS

SEQ ID NO: 1229 - protein, 15 aa, Artificial Sequence
  source: /note="Description of Artificial Sequence: Synthetic peptide"
GGKGSGGKGSGGKGS

SEQ ID NO: 1230 - protein, 5 aa, Artificial Sequence
  source: /note="Description of Artificial Sequence: Synthetic peptide"
GGSGG

SEQ ID NO: 1231 - protein, 9 aa, Artificial Sequence
  source: /note="Description of Artificial Sequence: Synthetic peptide"
GGSGGGGSG

SEQ ID NO: 1232 - protein, 13 aa, Artificial Sequence
  source: /note="Description of Artificial Sequence: Synthetic peptide"
GGSGGGGSGGGGS

SEQ ID NO: 1233 - protein, 20 aa, Artificial Sequence
  source: /note="Description of Artificial Sequence: Synthetic peptide"
GKPGSGKPGSGKPGSGKPGS

SEQ ID NO: 1234 - protein, 15 aa, Artificial Sequence
  source: /note="Description of Artificial Sequence: Synthetic peptide"
GPAKELTPLKEAKVS

SEQ ID NO: 1235 - protein, 12 aa, Artificial Sequence
  source: /note="Description of Artificial Sequence: Synthetic peptide"
GSAGSAAGSGEF

SEQ ID NO: 1236 - protein, 14 aa, Artificial Sequence
  source: /note="Description of Artificial Sequence: Synthetic peptide"
IRPRAIGGSKPRVA

SEQ ID NO: 1237 - protein, 18 aa, Artificial Sequence
  source: /note="Description of Artificial Sequence: Synthetic peptide"
KESGSVSSEQLAQFRSLD

SEQ ID NO: 1238 - protein, 15 aa, Artificial Sequence
  source: /note="Description of Artificial Sequence: Synthetic peptide"
KTTPKLEEGEFSEAR

SEQ ID NO: 1239 - protein, 6 aa, Artificial Sequence
  source: /note="Description of Artificial Sequence: Synthetic peptide"
QPKAAP

SEQ ID NO: 1240 - protein, 13 aa, Artificial Sequence
  source: /note="Description of Artificial Sequence: Synthetic peptide"
QPKAAPSVTLFPP

SEQ ID NO: 1241 - protein, 27 aa, Artificial Sequence
  source: /note="Description of Artificial Sequence: Synthetic peptide"
RADAAAAGGGGSGGGGSGGGGSGGGGS

SEQ ID NO: 1242 - protein, 12 aa, Artificial Sequence
  source: /note="Description of Artificial Sequence: Synthetic peptide"
RADAAAAGGPGS

SEQ ID NO: 1243 - protein, 6 aa, Artificial Sequence
  source: /note="Description of Artificial Sequence: Synthetic peptide"
RADAAP

SEQ ID NO: 1244 - protein, 9 aa, Artificial Sequence
  source: /note="Description of Artificial Sequence: Synthetic peptide"
RADAAPTVS

SEQ ID NO: 1245 - protein, 6 aa, Artificial Sequence
  source: /note="Description of Artificial Sequence: Synthetic peptide"
SAKTTP

SEQ ID NO: 1246 - protein, 18 aa, Artificial Sequence
  source: /note="Description of Artificial Sequence: Synthetic peptide"
SAKTTPKLEEGEFSEARV

SEQ ID NO: 1247 - protein, 10 aa, Artificial Sequence
  source: /note="Description of Artificial Sequence: Synthetic peptide"
SAKTTPKLGG

SEQ ID NO: 1248 - protein, 14 aa, Artificial Sequence
  source: /note="Description of Artificial Sequence: Synthetic peptide"
STAGDTHLGGEDFD

SEQ ID NO: 1249 - protein, 5 aa, Artificial Sequence
  source: /note="Description of Artificial Sequence: Synthetic peptide"
TVAAP

SEQ ID NO: 1250 - protein, 12 aa, Artificial Sequence
  source: /note="Description of Artificial Sequence: Synthetic peptide"
TVAAPSVFIFPP

SEQ ID NO: 1251 - protein, 24 aa, Artificial Sequence
  source: /note="Description of Artificial Sequence: Synthetic peptide"
TVAAPSVFIFPPTVAAPSVFIFPP

SEQ ID NO: 1252 - protein, 19 aa, Artificial Sequence
  source: /note="Description of Artificial Sequence: Synthetic peptide"
PRGASKSGSASQTGSAPGS

SEQ ID NO: 1253 - protein, 6 aa, Artificial Sequence
  source: /note="Description of Artificial Sequence: Synthetic 6xHis tag"
HHHHHH

SEQ ID NO: 1254 - protein, 217 aa, Artificial Sequence
  source: /note="Description of Artificial Sequence: Synthetic polypeptide"
APEAAGGPSVFLFPPKPKDTLMISRTPEVTCVVVDVSHEDPEVKFNWYVDGVEVHNAKTKPREEQYNSTYRVVSVLTVLHQDWLNGKEYKCKVSNKALAAPIEKTISKAKGQPREPQVYTLPPSRDELTKNQVSLTCLVKGFYPSDIAVEWESNGQPENNYKTTPPVLDSDGSFFLYSKLTVDKSRWQQGNVFSCSVMHEALHNHYTQKSLSLSPGK

SEQ ID NO: 1255 - DNA, 651 bp, Artificial Sequence
  source: /note="Description of Artificial Sequence: Synthetic polynucleotide"
gcccctgaagccgccggcggaccctccgtgttcctgttccccccaaagcccaaggacaccctgatgatcagccggacccccgaagtgacctgcgtggtggtggacgtgtcccacgaggaccctgaagtgaagttcaattggtacgtggacggcgtggaagtgcacaacgccaagaccaagcccagagaggaacagtacaacagcacctaccgggtggtgtccgtgctgaccgtgctgcaccaggactggctgaacggcaaagagtacaagtgcaaagtctccaacaaggccctggccgcccccatcgagaaaaccatcagcaaggccaagggccagccccgcgagccccaggtgtacacactgccccccagccgggacgagctgaccaagaaccaggtgtccctgacctgcctggtcaagggcttctaccccagcgatatcgccgtggaatgggagagcaacggccagcccgagaacaactacaagaccaccccccctgtgctggacagcgacggctcattcttcctgtacagcaagctgaccgtggacaagtcccggtggcagcagggcaacgtgttcagctgcagcgtgatgcacgaggccctgcacaaccactacacccagaagtccctgagcctgagccccggcaaa

SEQ ID NO: 1256 - protein, 217 aa, Artificial Sequence
  source: /note="Description of Artificial Sequence: Synthetic polypeptide"
APEAAGAPSVFLFPPKPKDTLMISRTPEVTCVVVDVSHEDPEVKFNWYVDGVEVHNAKTKPREEQYNSTYRVVSVLTVLHQDWLNGKEYKCKVSNKALPAPIEKTISKAKGQPREPQVYTLPPSRDELTKNQVSLTCLVKGFYPSDIAVEWESNGQPENNYKTTPPVLDSDGSFFLYSKLTVDKSRWQQGNVFSCSVMHEALHNHYTQKSLSLSPGK

SEQ ID NO: 1257 - DNA, 651 bp, Artificial Sequence
  source: /note="Description of Artificial Sequence: Synthetic polynucleotide"
gcccctgaagccgccggcgccccctccgtgttcctgttccccccaaagcccaaggacaccctgatgatcagccggacccccgaagtgacctgcgtggtggtggacgtgtcccacgaggaccctgaagtgaagttcaattggtacgtggacggcgtggaagtgcacaacgccaagaccaagcccagagaggaacagtacaacagcacctaccgggtggtgtccgtgctgaccgtgctgcaccaggactggctgaacggcaaagagtacaagtgcaaagtctccaacaaggccctgcctgcccccatcgagaaaaccatcagcaaggccaagggccagccccgcgagccccaggtgtacacactgccccccagccgggacgagctgaccaagaaccaggtgtccctgacctgcctggtcaagggcttctaccccagcgatatcgccgtggaatgggagagcaacggccagcccgagaacaactacaagaccaccccccctgtgctggacagcgacggctcattcttcctgtacagcaagctgaccgtggacaagtcccggtggcagcagggcaacgtgttcagctgcagcgtgatgcacgaggccctgcacaaccactacacccagaagtccctgagcctgagccccggcaaa

SEQ ID NO: 1258 - protein, 217 aa, Artificial Sequence
  source: /note="Description of Artificial Sequence: Synthetic polypeptide"
APEAAGGPSVFLFPPKPKDTLMISRTPEVTCVVVDVSHEDPEVKFNWYVDGVEVHNAKTKPREEQYNSTYRVVSVLTVLHQDWLNGKEYKCKVSNKALGAPIEKTISKAKGQPREPQVYTLPPSRDELTKNQVSLTCLVKGFYPSDIAVEWESNGQPENNYKTTPPVLDSDGSFFLYSKLTVDKSRWQQGNVFSCSVMHEALHNHYTQKSLSLSPGK

SEQ ID NO: 1259 - DNA, 651 bp, Artificial Sequence
  source: /note="Description of Artificial Sequence: Synthetic polynucleotide"
gcccctgaagccgccggcggaccctccgtgttcctgttccccccaaagcccaaggacaccctgatgatcagccggacccccgaagtgacctgcgtggtggtggacgtgtcccacgaggaccctgaagtgaagttcaattggtacgtggacggcgtggaagtgcacaacgccaagaccaagcccagagaggaacagtacaacagcacctaccgggtggtgtccgtgctgaccgtgctgcaccaggactggctgaacggcaaagagtacaagtgcaaagtctccaacaaggccctgggcgcccccatcgagaaaaccatcagcaaggccaagggccagccccgcgagccccaggtgtacacactgccccccagccgggacgagctgaccaagaaccaggtgtccctgacctgcctggtcaagggcttctaccccagcgatatcgccgtggaatgggagagcaacggccagcccgagaacaactacaagaccaccccccctgtgctggacagcgacggctcattcttcctgtacagcaagctgaccgtggacaagtcccggtggcagcagggcaacgtgttcagctgcagcgtgatgcacgaggccctgcacaaccactacacccagaagtccctgagcctgagccccggcaaa

SEQ ID NO: 1260 - protein, 217 aa, Artificial Sequence
  source: /note="Description of Artificial Sequence: Synthetic polypeptide"
APEAAGGPSVFLFPPKPKDTLMISRTPEVTCVVVDVKHEDPEVKFNWYVDGVEVHNAKTKPREEQYNSTYRVVSVLTVLHQDWLNGKEYKCKVSNKALAAPIEKTISKAKGQPREPQVYTLPPSRDELTKNQVSLTCLVKGFYPSDIAVEWESNGQPENNYKTTPPVLDSDGSFFLYSKLTVDKSRWQQGNVFSCSVMHEALHNHYTQKSLSLSPGK

SEQ ID NO: 1261 - DNA, 651 bp, Artificial Sequence
  source: /note="Description of Artificial Sequence: Synthetic polynucleotide"
gcccctgaagccgccggcggaccctccgtgttcctgttccccccaaagcccaaggacaccctgatgatcagccggacccccgaagtgacctgcgtggtggtggacgtgaagcacgaggaccctgaagtgaagttcaattggtacgtggacggcgtggaagtgcacaacgccaagaccaagcccagagaggaacagtacaacagcacctaccgggtggtgtccgtgctgaccgtgctgcaccaggactggctgaacggcaaagagtacaagtgcaaagtctccaacaaggccctggccgcccccatcgagaaaaccatcagcaaggccaagggccagccccgcgagccccaggtgtacacactgccccccagccgggacgagctgaccaagaaccaggtgtccctgacctgcctggtcaagggcttctaccccagcgatatcgccgtggaatgggagagcaacggccagcccgagaacaactacaagaccaccccccctgtgctggacagcgacggctcattcttcctgtacagcaagctgaccgtggacaagtcccggtggcagcagggcaacgtgttcagctgcagcgtgatgcacgaggccctgcacaaccactacacccagaagtccctgagcctgagccccggcaaa

SEQ ID NO: 1262 - protein, 217 aa, Artificial Sequence
  source: /note="Description of Artificial Sequence: Synthetic polypeptide"
APELLGGPSVFLFPPKPKDTLMISRTPEVTCVVVAVKHEDPEVKFNWYVDGVEVHNAKTKPREEQYNSTYRVVSVLTVLHQDWLNGKEYKCKVSNKALAAPIEKTISKAKGQPREPQVYTLPPSRDELTKNQVSLTCLVKGFYPSDIAVEWESNGQPENNYKTTPPVLDSDGSFFLYSKLTVDKSRWQQGNVFSCSVMHEALHNHYTQKSLSLSPGK

SEQ ID NO: 1263 - DNA, 651 bp, Artificial Sequence
  source: /note="Description of Artificial Sequence: Synthetic polynucleotide"
gcccctgaactgctgggcggaccctccgtgttcctgttccccccaaagcccaaggacaccctgatgatcagccggacccccgaagtgacctgcgtggtggtggccgtgaagcacgaggaccctgaagtgaagttcaattggtacgtggacggcgtggaagtgcacaacgccaagaccaagcccagagaggaacagtacaacagcacctaccgggtggtgtccgtgctgaccgtgctgcaccaggactggctgaacggcaaagagtacaagtgcaaagtctccaacaaggccctggccgcccccatcgagaaaaccatcagcaaggccaagggccagccccgcgagccccaggtgtacacactgccccccagccgggacgagctgaccaagaaccaggtgtccctgacctgcctggtcaagggcttctaccccagcgatatcgccgtggaatgggagagcaacggccagcccgagaacaactacaagaccaccccccctgtgctggacagcgacggctcattcttcctgtacagcaagctgaccgtggacaagtcccggtggcagcagggcaacgtgttcagctgcagcgtgatgcacgaggccctgcacaaccactacacccagaagtccctgagcctgagccccggcaaa

SEQ ID NO: 1264 - protein, 217 aa, Artificial Sequence
  source: /note="Description of Artificial Sequence: Synthetic polypeptide"
APELLGAPSVFLFPPKPKDTLMISRTPEVTCVVVAVSHEDPEVKFNWYVDGVEVHNAKTKPREEQYNSTYRVVSVLTVLHQDWLNGKEYKCKVSNKALAAPIEKTISKAKGQPREPQVYTLPPSRDELTKNQVSLTCLVKGFYPSDIAVEWESNGQPENNYKTTPPVLDSDGSFFLYSKLTVDKSRWQQGNVFSCSVMHEALHNHYTQKSLSLSPGK

SEQ ID NO: 1265 - DNA, 651 bp, Artificial Sequence
  source: /note="Description of Artificial Sequence: Synthetic polynucleotide"
gcccctgaactgctgggcgccccctccgtgttcctgttccccccaaagcccaaggacaccctgatgatcagccggacccccgaagtgacctgcgtggtggtggccgtgtcccacgaggaccctgaagtgaagttcaattggtacgtggacggcgtggaagtgcacaacgccaagaccaagcccagagaggaacagtacaacagcacctaccgggtggtgtccgtgctgaccgtgctgcaccaggactggctgaacggcaaagagtacaagtgcaaagtctccaacaaggccctggccgcccccatcgagaaaaccatcagcaaggccaagggccagccccgcgagccccaggtgtacacactgccccccagccgggacgagctgaccaagaaccaggtgtccctgacctgcctggtcaagggcttctaccccagcgatatcgccgtggaatgggagagcaacggccagcccgagaacaactacaagaccaccccccctgtgctggacagcgacggctcattcttcctgtacagcaagctgaccgtggacaagtcccggtggcagcagggcaacgtgttcagctgcagcgtgatgcacgaggccctgcacaaccactacacccagaagtccctgagcctgagccccggcaaa

SEQ ID NO: 1266 - protein, 217 aa, Artificial Sequence
  source: /note="Description of Artificial Sequence: Synthetic polypeptide"
APELLGAPSVFLFPPKPKDTLMISRTPEVTCVVVAVKHEDPEVKFNWYVDGVEVHNAKTKPREEQYNSTYRVVSVLTVLHQDWLNGKEYKCKVSNKALAAPIEKTISKAKGQPREPQVYTLPPSRDELTKNQVSLTCLVKGFYPSDIAVEWESNGQPENNYKTTPPVLDSDGSFFLYSKLTVDKSRWQQGNVFSCSVMHEALHNHYTQKSLSLSPGK

SEQ ID NO: 1267 - DNA, 651 bp, Artificial Sequence
  source: /note="Description of Artificial Sequence: Synthetic polynucleotide"
gcccctgaactgctgggcgccccctccgtgttcctgttccccccaaagcccaaggacaccctgatgatcagccggacccccgaagtgacctgcgtggtggtggccgtgaagcacgaggaccctgaagtgaagttcaattggtacgtggacggcgtggaagtgcacaacgccaagaccaagcccagagaggaacagtacaacagcacctaccgggtggtgtccgtgctgaccgtgctgcaccaggactggctgaacggcaaagagtacaagtgcaaagtctccaacaaggccctggccgcccccatcgagaaaaccatcagcaaggccaagggccagccccgcgagccccaggtgtacacactgccccccagccgggacgagctgaccaagaaccaggtgtccctgacctgcctggtcaagggcttctaccccagcgatatcgccgtggaatgggagagcaacggccagcccgagaacaactacaagaccaccccccctgtgctggacagcgacggctcattcttcctgtacagcaagctgaccgtggacaagtcccggtggcagcagggcaacgtgttcagctgcagcgtgatgcacgaggccctgcacaaccactacacccagaagtccctgagcctgagccccggcaaa

SEQ ID NO: 1268 - protein, 217 aa, Artificial Sequence
  source: /note="Description of Artificial Sequence: Synthetic polypeptide"
APELLGGPSVFLFPPKPKDTLMISRTPEVTCVVVAVSHEDPEVKFNWYVDGVEVHNAKTKPREEQYNSTYRVVSVLTVLHQDWLNGKEYKCKVSNKALAAPIEKTISKAKGQPREPQVYTLPPSRDELTKNQVSLTCLVKGFYPSDIAVEWESNGQPENNYKTTPPVLDSDGSFFLYSKLTVDKSRWQQGNVFSCSVMHEALHNHYTQKSLSLSPGK

SEQ ID NO: 1269 - DNA, 651 bp, Artificial Sequence
  source: /note="Description of Artificial Sequence: Synthetic polynucleotide"
gcccctgaactgctgggcggaccctccgtgttcctgttccccccaaagcccaaggacaccctgatgatcagccggacccccgaagtgacctgcgtggtggtggccgtgtcccacgaggaccctgaagtgaagttcaattggtacgtggacggcgtggaagtgcacaacgccaagaccaagcccagagaggaacagtacaacagcacctaccgggtggtgtccgtgctgaccgtgctgcaccaggactggctgaacggcaaagagtacaagtgcaaagtctccaacaaggccctggccgcccccatcgagaaaaccatcagcaaggccaagggccagccccgcgagccccaggtgtacacactgccccccagccgggacgagctgaccaagaaccaggtgtccctgacctgcctggtcaagggcttctaccccagcgatatcgccgtggaatgggagagcaacggccagcccgagaacaactacaagaccaccccccctgtgctggacagcgacggctcattcttcctgtacagcaagctgaccgtggacaagtcccggtggcagcagggcaacgtgttcagctgcagcgtgatgcacgaggccctgcacaaccactacacccagaagtccctgagcctgagccccggcaaa

SEQ ID NO: 1270 - protein, 217 aa, Artificial Sequence
  source: /note="Description of Artificial Sequence: Synthetic polypeptide"
APELLGGPSVFLFPPKPKDTLMISRTPEVTCVVVAVSHEDPEVKFNWYVDGVEVHNAKTKPREEQYASTYRVVSVLTVLHQDWLNGKEYKCKVSNKALAAPIEKTISKAKGQPREPQVYTLPPSRDELTKNQVSLTCLVKGFYPSDIAVEWESNGQPENNYKTTPPVLDSDGSFFLYSKLTVDKSRWQQGNVFSCSVMHEALHNHYTQKSLSLSPGK

SEQ ID NO: 1271 - DNA, 651 bp, Artificial Sequence
  source: /note="Description of Artificial Sequence: Synthetic polynucleotide"
gcccctgaactgctgggaggccctagcgtgttcctgttccccccaaagcccaaggacaccctgatgatcagccggacccccgaagtgacctgtgtggtggtggccgtgtctcacgaggaccctgaagtgaagtttaattggtacgtggacggcgtggaagtgcacaacgccaagaccaagcccagagaggaacagtacgccagcacctaccgggtggtgtccgtgctgacagtgctgcaccaggactggctgaacggcaaagagtacaagtgcaaggtgtccaacaaggccctggccgctcccatcgagaaaaccatcagcaaggccaagggccagccccgcgaaccccaggtgtacacactgccccctagcagggacgagctgaccaagaaccaggtgtccctgacctgcctcgtgaagggcttctacccctccgatatcgccgtggaatgggagagcaacggccagcccgagaacaactacaagaccaccccccctgtgctggactccgacggctcattcttcctgtacagcaagctgaccgtggacaagtcccggtggcagcagggcaacgtgttcagctgctccgtgatgcacgaggccctgcacaaccactacacccagaagtccctgagcctgagccccggcaaa

SEQ ID NO: 1272 - protein, 455 aa, Artificial Sequence
  source: /note="Description of Artificial Sequence: Synthetic polypeptide"
EVQLVESGGGLVQPGGSLKLSCAASGFTFNTYAMNWVRQASGKGLEWVGRIRSKYNNYATYYADSVKDRFTISRDDSKSTLYLQMNSLKTEDTAVYYCVRHGNFGNSYVSWFAYWGQGTLVTVSSASTKGPSVFPLAPSSKSTSGGTAALGCLVKDYFPEPVTVSWNSGALTSGVHTFPAVLQSSGLYSLSSVVTVPSSSLGTQTYICNVNHKPSNTKVDKRVEPKSCDKTHTCPPCPAPELLGGPSVFLFPPKPKDTLMISRTPEVTCVVVDVSHEDPEVKFNWYVDGVEVHNAKTKPREEQYNSTYRVVSVLTVLHQDWLNGKEYKCKVSNKALPAPIEKTISKAKGQPREPQVYTLPPSRDELTKNQVSLTCLVKGFYPSDIAVEWESNGQPENNYKTTPPVLDSDGSFFLYSKLTVDKSRWQQGNVFSCSVMHEALHNHYTQKSLSLSPGK

SEQ ID NO: 1273 - DNA, 1365 bp, Artificial Sequence
  source: /note="Description of Artificial Sequence: Synthetic polynucleotide"
gaagtgcagctggtggaatctggcggcggactggtgcagcctggcggatctctgaagctgagctgtgccgccagcggcttcaccttcaacacctacgccatgaactgggtgcgccaggcctctggcaagggcctggaatgggtgggacggatcagaagcaagtacaacaattacgccacctactacgccgacagcgtgaaggaccggttcaccatcagccgggacgacagcaagagcaccctgtacctgcagatgaacagcctgaaaaccgaggacaccgccgtgtactactgcgtgcggcacggcaacttcggcaacagctatgtgtcttggtttgcctactggggccagggcaccctcgtgacagtgagctcagctagcaccaagggccccagcgtgttccccctggcgcccagcagcaagagcaccagcggcggcacagccgccctgggctgcctggtgaaggactacttccccgagccagtgaccgtgtcctggaacagcggagccctgacctccggcgtgcacaccttccccgccgtgctgcagagcagcggcctgtacagcctgagcagcgtggtgaccgtgcccagcagcagcctgggcacccagacctacatctgcaacgtgaaccacaagcccagcaacaccaaggtggacaagagagtggagcccaagagctgcgacaagacccacacctgccccccctgtcctgcccctgaactgctgggcggaccctccgtgttcctgttccccccaaagcccaaggacaccctgatgatcagccggacccccgaagtgacctgcgtggtggtggacgtgtcccacgaggaccctgaagtgaagttcaattggtacgtggacggcgtggaagtgcacaacgccaagaccaagcccagagaggaacagtacaacagcacctaccgggtggtgtccgtgctgaccgtgctgcaccaggactggctgaacggcaaagagtacaagtgcaaagtctccaacaaggccctgcctgcccccatcgagaaaaccatcagcaaggccaagggccagccccgcgagccccaggtgtacacactgccccccagccgggacgagctgaccaagaaccaggtgtccctgacctgcctggtcaagggcttctaccccagcgatatcgccgtggaatgggagagcaacggccagcccgagaacaactacaagaccaccccccctgtgctggacagcgacggctcattcttcctgtacagcaagctgaccgtggacaagtcccggtggcagcagggcaacgtgttcagctgcagcgtgatgcacgaggccctgcacaaccactacacccagaagtccctgagcctgagccccggcaaa

SEQ ID NO: 1274 - protein, 455 aa, Artificial Sequence
  source: /note="Description of Artificial Sequence: Synthetic polypeptide"
EVQLVESGGGLVQPGGSLKLSCAASGFTFNTYAMNWVRQASGKGLEWVGRIRSKYNNYATYYADSVKDRFTISRDDSKSTLYLQMNSLKTEDTAVYYCVRHGNFGNSYVSWFAYWGQGTLVTVSSASTKGPSVFPLAPSSKSTSGGTAALGCLVKDYFPEPVTVSWNSGALTSGVHTFPAVLQSSGLYSLSSVVTVPSSSLGTQTYICNVNHKPSNTKVDKKVEPKSCDKTHTCPPCPAPELLGGPSVFLFPPKPKDTLMISRTPEVTCVVVDVSHEDPEVKFNWYVDGVEVHNAKTKPREEQYNSTYRVVSVLTVLHQDWLNGKEYKCKVSNKALPAPIEKTISKAKGQPREPQVYTLPPSRDELTKNQVSLTCLVKGFYPSDIAVEWESNGQPENNYKTTPPVLDSDGSFFLYSKLTVDKSRWQQGNVFSCSVMHEALHNHYTQKSLSLSPGK

SEQ ID NO: 1275 - DNA, 1365 bp, Artificial Sequence
  source: /note="Description of Artificial Sequence: Synthetic polynucleotide"
gaagtgcagctggtggaatctggcggcggactggtgcagcctggcggatctctgaagctgagctgtgccgccagcggcttcaccttcaacacctacgccatgaactgggtgcgccaggcctctggcaagggcctggaatgggtgggacggatcagaagcaagtacaacaattacgccacctactacgccgacagcgtgaaggaccggttcaccatcagccgggacgacagcaagagcaccctgtacctgcagatgaacagcctgaaaaccgaggacaccgccgtgtactactgcgtgcggcacggcaacttcggcaacagctatgtgtcttggtttgcctactggggccagggcaccctcgtgacagtgagctcagctagcaccaagggccccagcgtgttccccctggcgcccagcagcaagagcaccagcggcggcacagccgccctgggctgcctggtgaaggactacttccccgagccagtgaccgtgtcctggaacagcggagccctgacctccggcgtgcacaccttccccgccgtgctgcagagcagcggcctgtacagcctgagcagcgtggtgaccgtgcccagcagcagcctgggcacccagacctacatctgcaacgtgaaccacaagcccagcaacaccaaggtggacaagaaggtggagcccaagagctgcgacaagacccacacctgccccccctgtcctgcccctgaactgctgggcggaccctccgtgttcctgttccccccaaagcccaaggacaccctgatgatcagccggacccccgaagtgacctgcgtggtggtggacgtgtcccacgaggaccctgaagtgaagttcaattggtacgtggacggcgtggaagtgcacaacgccaagaccaagcccagagaggaacagtacaacagcacctaccgggtggtgtccgtgctgaccgtgctgcaccaggactggctgaacggcaaagagtacaagtgcaaagtctccaacaaggccctgcctgcccccatcgagaaaaccatcagcaaggccaagggccagccccgcgagccccaggtgtacacactgccccccagccgggacgagctgaccaagaaccaggtgtccctgacctgcctggtcaagggcttctaccccagcgatatcgccgtggaatgggagagcaacggccagcccgagaacaactacaagaccaccccccctgtgctggacagcgacggctcattcttcctgtacagcaagctgaccgtggacaagtcccggtggcagcagggcaacgtgttcagctgcagcgtgatgcacgaggccctgcacaaccactacacccagaagtccctgagcctgagccccggcaaa

SEQ ID NO: 1276 - protein, 215 aa, Artificial Sequence
  source: /note="Description of Artificial Sequence: Synthetic polypeptide"
QAVVTQEPSLTVSPGGTVTLTCRSSTGAVTTSNYANWVQQKPGQAPRGLIGGTNKRAPWTPARFSGSLLGDKAALTLSGAQPEDEAEYFCALWYSNLWVFGGGTKLTVLGQPKAAPSVTLFPPSSEELQANKATLVCLISDFYPGAVTVAWKADSSPVKAGVETTTPSKQSNNKYAASSYLSLTPEQWKSHRSYSCQVTHEGSTVEKTVAPTECS

SEQ ID NO: 1277 - DNA, 645 bp, Artificial Sequence
  source: /note="Description of Artificial Sequence: Synthetic polynucleotide"
caggctgtcgtgacccaggaacctagcctgaccgtgtctcctggcggaaccgtgaccctgacctgtagatctagcacaggcgccgtgaccaccagcaactacgccaattgggtgcagcagaagcccggccaggctcctagaggactgatcggcggcaccaacaagagagccccttggacccctgccagattcagcggctctctgctgggagataaggccgccctgacactgtctggcgcccagcctgaggatgaggccgagtacttttgcgccctgtggtacagcaacctgtgggtgttcggcggaggcaccaagctgaccgtgctgggccagcctaaggccgctccctccgtgaccctgttcccccccagctccgaggaactgcaggccaacaaggccaccctggtgtgcctgatcagcgacttctaccctggcgccgtgaccgtggcctggaaggccgacagcagccccgtgaaggccggcgtggagacaaccacccccagcaagcagagcaacaacaagtacgccgccagcagctacctgagcctgacccccgagcagtggaagagccacagaagctacagctgccaggtcacccacgagggcagcaccgtggagaaaaccgtggcccccaccgagtgcagc

SEQ ID NO: 1278 - protein, 187 aa, Artificial Sequence
  source: /note="Description of Artificial Sequence: Synthetic polypeptide"
  VARIANT (1)..(1): /replace="Ser"
  VARIANT (9)..(9): /replace="Lys"
  VARIANT (21)..(21): /replace="Gln"
  VARIANT (58)..(58): /replace="Lys"
  VARIANT (85)..(85): /replace="Ser"
  VARIANT (93)..(93): /replace="Gly"
  SITE (1)..(187): /note="Variant residues given in the sequence have no preference with respect to those in the annotations for variant positions"
FSQQIYGVVYGNVTFHVPSNVPLKEVLWKKQKDKVAELENSEFRAFSSFKNRVYLDTVSGSLTIYNLTSSDEDEYEMESPNITDTMKFFLYVLESLPSPTLTCALTNGSIEVQCMIPEHYNSHRGLIMYSWDCPMEQCKRNSTSIYFKMENDLPQKIQCTLSNPLFNTTSSIILTTCIPSSGHSRHR

SEQ ID NO: 1279 - protein, 125 aa, Artificial Sequence
  source: /note="Description of Artificial Sequence: Synthetic polypeptide"
EVQLVESGGGLVQPGGSLKLSCAASGFTFNTYAMNWVRQASGKGLEWVGRIRSKYNNYATYYADSVKDRFTISRDDSKSTLYLQMNSLKTEDTAVYYCVRHGNFGNSYVSWFAYWGQGTLVTVSS

SEQ ID NO: 1280 - protein, 109 aa, Artificial Sequence
  source: /note="Description of Artificial Sequence: Synthetic polypeptide"
QAVVTQEPSLTVSPGGTVTLTCRSSTGAVTTSNYANWVQQKPGQAPRGLIGGTNKRAPWTPARFSGSLLGDKAALTLSGAQPEDEAEYFCALWYSNLWVFGGGTKLTVL

SEQ ID NO: 1281 - protein, 254 aa, Artificial Sequence
  source: /note="Description of Artificial Sequence: Synthetic polypeptide"
EVQLVESGGGLVQPGGSLKLSCAASGFTFNTYAMNWVRQASGKGLEWVGRIRSKYNNYATYYADSVKDRFTISRDDSKSTLYLQMNSLKTEDTAVYYCVRHGNFGNSYVSWFAYWGQGTLVTVSSGGGGSGGGGSGGGGSGGGGSQAVVTQEPSLTVSPGGTVTLTCRSSTGAVTTSNYANWVQQKPGQAPRGLIGGTNKRAPWTPARFSGSLLGDKAALTLSGAQPEDEAEYFCALWYSNLWVFGGGTKLTVL

SEQ ID NO: 1282 - protein, 125 aa, Artificial Sequence
  source: /note="Description of Artificial Sequence: Synthetic polypeptide"
EVQLVESGGGLVQPGGSLKLSCAASGFTFNTYAMNWVRQASGKGLEWVGRIRSKYNNYATYYADSVKDRFTISRDDSKNTAYLQMNSLKTEDTAVYYCVRHGNFGNSYVSWFAHWGQGTLVTVSS

SEQ ID NO: 1283 - protein, 109 aa, Artificial Sequence
  source: /note="Description of Artificial Sequence: Synthetic polypeptide"
QAVVTQEPSLTVSPGGTVTLTCGSSTGAVTSSNYANWVQQKPGQAPRGLIGGTNKRAPWTPARFSGSLLGGKAALTLSGAQPEDEAEYYCALWYSNLWVFGGGTKLTVL

SEQ ID NO: 1284 - protein, 254 aa, Artificial Sequence
  source: /note="Description of Artificial Sequence: Synthetic polypeptide"
EVQLVESGGGLVQPGGSLKLSCAASGFTFNTYAMNWVRQASGKGLEWVGRIRSKYNNYATYYADSVKDRFTISRDDSKNTAYLQMNSLKTEDTAVYYCVRHGNFGNSYVSWFAHWGQGTLVTVSSGGGGSGGGGSGGGGSGGGGSQAVVTQEPSLTVSPGGTVTLTCGSSTGAVTSSNYANWVQQKPGQAPRGLIGGTNKRAPWTPARFSGSLLGGKAALTLSGAQPEDEAEYYCALWYSNLWVFGGGTKLTVL

SEQ ID NO: 1285 - protein, 125 aa, Artificial Sequence
  source: /note="Description of Artificial Sequence: Synthetic polypeptide"
EVQLVESGGGLVQPGGSLKLSCAASGFTFNTYAMNWVRQASGKGLEWVGRIRSKYNNYATYYADSVKDRFTISRDDSKSTAYLQMNSLKTEDTAVYYCVRHGNFGNSYVSWFAYWGQGTLVTVSS

SEQ ID NO: 1286 - protein, 254 aa, Artificial Sequence
  source: /note="Description of Artificial Sequence: Synthetic polypeptide"
EVQLVESGGGLVQPGGSLKLSCAASGFTFNTYAMNWVRQASGKGLEWVGRIRSKYNNYATYYADSVKDRFTISRDDSKSTAYLQMNSLKTEDTAVYYCVRHGNFGNSYVSWFAYWGQGTLVTVSSGGGGSGGGGSGGGGSGGGGSQAVVTQEPSLTVSPGGTVTLTCRSSTGAVTTSNYANWVQQKPGQAPRGLIGGTNKRAPWTPARFSGSLLGDKAALTLSGAQPEDEAEYFCALWYSNLWVFGGGTKLTVL

SEQ ID NO: 1287 - protein, 5 aa, Artificial Sequence
  source: /note="Description of Artificial Sequence: Synthetic peptide"
TYAMN

SEQ ID NO: 1288 - protein, 14 aa, Artificial Sequence
  source: /note="Description of Artificial Sequence: Synthetic peptide"
RSSTGAVTTSNYAN

SEQ ID NO: 1289 - protein, 14 aa, Artificial Sequence
  source: /note="Description of Artificial Sequence: Synthetic peptide"
GSSTGAVTSSNYAN

SEQ ID NO: 1290 - protein, 19 aa, Artificial Sequence
  source: /note="Description of Artificial Sequence: Synthetic peptide"
RIRSKYNNYATYYADSVKD

SEQ ID NO: 1291 - protein, 7 aa, Artificial Sequence
  source: /note="Description of Artificial Sequence: Synthetic peptide"
GTNKRAP

SEQ ID NO: 1292 - protein, 14 aa, Artificial Sequence
  source: /note="Description of Artificial Sequence: Synthetic peptide"
HGNFGNSYVSWFAY

SEQ ID NO: 1293 - protein, 9 aa, Artificial Sequence
  source: /note="Description of Artificial Sequence: Synthetic peptide"
ALWYSNLWV

SEQ ID NO: 1294 - protein, 14 aa, Artificial Sequence
  source: /note="Description of Artificial Sequence: Synthetic peptide"
HGNFGNSYVSWFAH

SEQ ID NO: 1295 - protein, 152 aa, Artificial Sequence
  source: /note="Description of Artificial Sequence: Synthetic polypeptide"
MQIFVKTLTGKTITLEVEPSDTIENVKAKIQDKEGIPPDQQWLWFAGKQLEDGRTLSDYNIQKESTLKLWLVDKAAMQIFVYTRTGKTITLEVEPSDTIENVKAKIQDKEGIPPDQQRLIWAGKQLEDGRTLSDYNIALESGLHLVLRLRAA

SEQ ID NO: 1296 - protein, 13 aa, Artificial Sequence
  source: /note="Description of Artificial Sequence: Synthetic peptide"
KASGYKFTSYVMH

SEQ ID NO: 1297 - protein, 16 aa, Artificial Sequence
  source: /note="Description of Artificial Sequence: Synthetic peptide"
YINPYNDVTKYNEKFK

SEQ ID NO: 1298 - protein, 11 aa, Artificial Sequence
  source: /note="Description of Artificial Sequence: Synthetic peptide"
GSYYDYDGFVY

SEQ ID NO: 1299 - protein, 10 aa, Artificial Sequence
  source: /note="Description of Artificial Sequence: Synthetic peptide"
SATSSVSYMH

SEQ ID NO: 1300 - protein, 7 aa, Artificial Sequence
  source: /note="Description of Artificial Sequence: Synthetic peptide"
DTSKLAS

SEQ ID NO: 1301 - protein, 9 aa, Artificial Sequence
  source: /note="Description of Artificial Sequence: Synthetic peptide"
QQWSSNPLT

SEQ ID NO: 1302 - protein, 120 aa, Artificial Sequence
  source: /note="Description of Artificial Sequence: Synthetic polypeptide"
EVQLQQSGPELVKPGASVKMSCKASGYKFTSYVMHWVKQKPGQGLEWIGYINPYNDVTKYNEKFKGKATLTSDKSSSTAYMELSSLTSEDSAVHYCARGSYYDYDGFVYWGQGTLVTVSA

SEQ ID NO: 1303 - protein, 106 aa, Artificial Sequence
  source: /note="Description of Artificial Sequence: Synthetic polypeptide"
QIVLTQSPAIMSASPGEKVTMTCSATSSVSYMHWYQQKSGTSPKRWIYDTSKLASGVPARFSGSGSGTSYSLTISSMEAEDAATYYCQQWSSNPLTFGAGTKLELK

SEQ ID NO: 1304 - protein, 5 aa, Artificial Sequence
  source: /note="Description of Artificial Sequence: Synthetic peptide"
EYYMY

SEQ ID NO: 1305 - protein, 17 aa, Artificial Sequence
  source: /note="Description of Artificial Sequence: Synthetic peptide"
RIDPEDGSIDYVEKFKK

SEQ ID NO: 1306 - protein, 9 aa, Artificial Sequence
  source: /note="Description of Artificial Sequence: Synthetic peptide"
GKFNYRFAY

SEQ ID NO: 1307 - protein, 16 aa, Artificial Sequence
  source: /note="Description of Artificial Sequence: Synthetic peptide"
RSSQSLLHSSGNTYLN

SEQ ID NO: 1308 - protein, 7 aa, Artificial Sequence
  source: /note="Description of Artificial Sequence: Synthetic peptide"
LVSKLES

SEQ ID NO: 1309 - protein, 8 aa, Artificial Sequence
  source: /note="Description of Artificial Sequence: Synthetic peptide"
QFTHYPYT

SEQ ID NO: 1310 - protein, 250 aa, Artificial Sequence
  source: /note="Description of Artificial Sequence: Synthetic polypeptide"
MVAGSDAGRALGVLSVVCLLHCFGFISCFSQQIYGVVYGNVTFHVPSNVPLKEVLWKKQKDKVAELENSEFRAFSSFKNRVYLDTVSGSLTIYNLTSSDEDEYEMESPNITDTMKFFLYVLESLPSPTLTCALTNGSIEVQCMIPEHYNSHRGLIMYSWDCPMEQCKRNSTSIYFKMENDLPQKIQCTLSNPLFNTTSSIILTTCIPSSGHSRHRYALIPIPLAVITTCIVLYMNGILKCDRKPDRTNSN

SEQ ID NO: 1311 - protein, 237 aa, Artificial Sequence
  source: /note="Description of Artificial Sequence: Synthetic polypeptide"
MVAGSDAGRALGVLSVVCLLHCFGFISCFSQQIYGVVYGNVTFHVPSNVPLKEVLWKKQKDKVAELENSEFRAFSSFKNRVYLDTVSGSLTIYNLTSSDEDEYEMESPNITDTMKFFLYVLESLPSPTLTCALTNGSIEVQCMIPEHYNSHRGLIMYSWDCPMEQCKRNSTSIYFKMENDLPQKIQCTLSNPLFNTTSSIILTTCIPSSGHSRHRYALIPIPLAVITTCIVLYMNVL

SEQ ID NO: 1312 - protein, 248 aa, Artificial Sequence
  source: /note="Description of Artificial Sequence: Synthetic polypeptide"
MVAGSDAGRALGVLSVVCLLHCFGFISCFSQQIYGVVYGNVTFHVPSNVPLKEVLWKKQKDKVAELENSEFRAFSSFKNRVYLDTVSGSLTIYNLTSSDEDEYEMESPNITDTMKFFLYVLESLPSPTLTCALTNGSIEVQCMIPEHYNSHRGLIMYSWDCPMEQCKRNSTSIYFKMENDLPQKIQCTLSNPLFNTTSSIILTTCIPSSGHSRHRYALIPIPLAVITTCIVLYMNGILKCDRKPDRTK

SEQ ID NO: 1313 - protein, 187 aa, Artificial Sequence; identical to SEQ ID NO: 1278
  source: /note="Description of Artificial Sequence: Synthetic polypeptide"

SEQ ID NO: 1314 - DNA, 978 bp, Artificial Sequence
  source: /note="Description of Artificial Sequence: Synthetic polynucleotide"
tctcagcagatctatggcgtggtgtacggcaacgtgaccttccacgtgccaagcaacgtgcccctgaaagaggtgctctggaagaaacagaaagacaaggtggccgagctggaaaacagcgagttcagagccttcagcagcttcaagaaccgggtgtacctggataccgtgtccggcagcctgaccatctacaatctgaccagcagcgacgaggacgagtacgagatggaaagccccaacatcaccgacaccatgaagttctttctgtacgtgctggaaagcggcggaggcggctctgataagacacacacatgtcctccatgtcctgctccagaagcagctggcggaccctctgttttcctgtttccacctaagccaaaggacaccctgatgatcagcagaacccctgaagtgacctgcgtggtggtggatgtgtctcacgaggaccccgaagtgaagttcaattggtacgtggacggcgtggaagtgcacaacgccaagaccaagcctagagaggaacagtacaacagcacctacagagtggtgtccgtgctgaccgtgctgcaccaggattggctgaacggcaaagagtacaagtgcaaggtgtccaacaaggccctgcctgctcctatcgagaaaaccatcagcaaggccaagggccagccaagagaaccccaggtttacaccctgcctccatgccgggaagagatgaccaagaatcaggtgtccctgtggtgcctggtcaagggcttctacccttccgatatcgccgtggaatgggagagcaatggccagcctgagaacaactacaagaccacacctcctgtgctggacagcgacggctcattcttcctgtacagcaagctgacagtggacaagagcagatggcagcagggcaacgtgttcagctgttctgtgatgcacgaggccctgcacaaccactacacccagaagtctctgtctctgagccccggcaaa

SEQ ID NO: 1315 - protein, 94 aa, Artificial Sequence
  source: /note="Description of Artificial Sequence: Synthetic polypeptide"
SQQIYGVVYGNVTFHVPSNVPLKEVLWKKQKDKVAELENSEFRAFSSFKNRVYLDTVSGSLTIYNLTSSDEDEYEMESPNITDTMKFFLYVLES

SEQ ID NO: 1316 - protein, 94 aa, Artificial Sequence; identical to SEQ ID NO: 1315
  source: /note="Description of Artificial Sequence: Synthetic polypeptide"
  VARIANT (8)..(8): /replace="Lys"
  VARIANT (20)..(20): /replace="Gln"
  SITE (1)..(94): /note="Variant residues given in the sequence have no preference with respect to those in the annotations for variant positions"

SEQ ID NO: 1317 - protein, 94 aa, Artificial Sequence
  source: /note="Description of Artificial Sequence: Synthetic polypeptide"
SQQIYGVVYGNVTFHCPSNVPLKEVLWKKQKDKVAELENSEFRAFSSFKNRVYLDTVSGSLTIYNLTSSDEDEYECESPNITDTMKFFLYVLES

SEQ ID NO: 1318 - protein, 94 aa, Artificial Sequence
  source: /note="Description of Artificial Sequence: Synthetic polypeptide"
SQQIYGVVYGNVTFHVPSNVPLKECLWKKQKDKVAELENSEFRAFSSFKNRVYLDTVSCSLTIYNLTSSDEDEYEMESPNITDTMKFFLYVLES

SEQ ID NO: 1319 - protein, 94 aa, Artificial Sequence
  source: /note="Description of Artificial Sequence: Synthetic polypeptide"
SQQIYGVVYGNVTFHCPSNVPLKEVLWKKQKDKVAELENSEFRAFSSFKNRVYLDTVSGSLTIYNLTSSDEDEYEMESPNITDTCKFFLYVLES

SEQ ID NO: 1320 - protein, 94 aa, Artificial Sequence
  source: /note="Description of Artificial Sequence: Synthetic polypeptide"
SQQIYGVVYGNVTFHVPSNVPLKEVLCKKQKDKVAELENSEFRAFSSFKNRVYLDTVSGSCTIYNLTSSDEDEYEMESPNITDTMKFFLYVLES

SEQ ID NO: 1321 - protein, 206 aa, Homo sapiens
SKEITNALETWGALGQDINLDIPSFQMSDDIDDIKWEKTSDKKKIAQFRKEKETFKEKDTYKLFKNGTLKIKHLKTDDQDIYKVSIYDTKGKNVLEKIFDLKIQERVSKPKISWTCINTTLTCEVMNGTDPELNLYQDGKHLKLSQRVITHKWTTSLSAKFKCTAGNKVSKESSVEPVSCPEKGLDGGGGSGLNDIFEAQKIEWHE

SEQ ID NO: 1322 - protein, 206 aa, Macaca fascicularis
SKEIRNALETWGALGQDIDLDIPSFQMSDDIDDIRWEKTSDKKKIAQFRKEKETFEEKDAYKLFKNGTLKIKHLKIHDQDSYKVSIYDTKGKNVLEKTFDLKIQERVSEPKISWTCINTTLTCEVMNGTDPELNLYQDGKHVKLSQRVITHKWTTSLSAKFKCTAGNKVSKESRMETVSCPEKGLDGGGGSGLNDIFEAQKIEWHE

SEQ ID NO: 1323 - protein, 199 aa, Artificial Sequence
  source: /note="Description of Artificial Sequence: Synthetic polypeptide"
SQQIYGVVYGNVTFHVPSNVPLKEVLWKKQKDKVAELENSEFRAFSSFKNRVYLDTVSGSLTIYNLTSSDEDEYEMESPNITDTMKFFLYVLESLPSPTLTCALTNGSIEVQCMIPEHYNSHRGLIMYSWDCPMEQCKRNSTSIYFKMENDLPQKIQCTLSNPLFNTTSSIILTTCIPSSGHSRHRGGGGSHHHHHHHH

SEQ ID NO: 1324 - protein, 107 aa, Artificial Sequence
  source: /note="Description of Artificial Sequence: Synthetic polypeptide"
SQQIYGVVYGNVTFHVPSNVPLKEVLWKKQKDKVAELENSEFRAFSSFKNRVYLDTVSGSLTIYNLTSSDEDEYEMESPNITDTMKFFLYVLESGGGGSHHHHHHHH

SEQ ID NO: 1325 - protein, 107 aa, Artificial Sequence
  source: /note="Description of Artificial Sequence: Synthetic polypeptide"
SQQIYGVVYGNVTFHCPSNVPLKEVLWKKQKDKVAELENSEFRAFSSFKNRVYLDTVSGSLTIYNLTSSDEDEYECESPNITDTMKFFLYVLESGGGGSHHHHHHHH

SEQ ID NO: 1326 - protein, 107 aa, Artificial Sequence
  source: /note="Description of Artificial Sequence: Synthetic polypeptide"
SQQIYGVVYGNVTFHVPSNVPLKECLWKKQKDKVAELENSEFRAFSSFKNRVYLDTVSCSLTIYNLTSSDEDEYEMESPNITDTMKFFLYVLESGGGGSHHHHHHHH

SEQ ID NO: 1327 - protein, 107 aa, Artificial Sequence
  source: /note="Description of Artificial Sequence: Synthetic polypeptide"
SQQIYGVVYGNVTFHCPSNVPLKEVLWKKQKDKVAELENSEFRAFSSFKNRVYLDTVSGSLTIYNLTSSDEDEYEMESPNITDTCKFFLYVLESGGGGSHHHHHHHH

SEQ ID NO: 1328 - protein, 492 aa, Artificial Sequence
  source: /note="Description of Artificial Sequence: Synthetic polypeptide"
QVQLQESGPGLVKPSETLSLTCTVSGVSLPDYGVSWIRQPPGKGLEWIGVIWGSETTYYQSSLKSRVTISKDNSKNQVSLKLSSVTAADTAVYYCAKHYYYGGSYAMDYWGQGTLVTVSSASTKGPSVFPLAPSSKSTSGGTAALGCLVKDYFPEPVTVSWNSGALTSGVHTFPAVLQSSGLYSLSSVVTVPSSSLGTQTYICNVNHKPSNTKVDKRVEPKSCGGGGSGGGGSEVQLVESGGGLVQPGGSLKLSCAASGFTFNTYAMNWVRQASGKGLEWVGRIRSKYNNYATYYADSVKDRFTISRDDSKSTLYLQMNSLKTEDTAVYYCVRHGNFGNSYVSWFAYWGQGTLVTVSSGGGGSGGGGSGGGGSGGGGSQAVVTQEPSLTVSPGGTVTLTCRSSTGAVTTSNYANWVQQKPGQAPRGLIGGTNKRAPWTPARFSGSLLGDKAALTLSGAQPEDEAEYFCALWYSNLWVFGGGTKLTVLGGGGS

SEQ ID NO: 1329 - protein, 191 aa, Artificial Sequence
  source: /note="Description of Artificial Sequence: Synthetic polypeptide"
FSQQIYGVVYGNVTFHVPSNVPLKEVLWKKQKDKVAELENSEFRAFSSFKNRVYLDTVSGSLTIYNLTSSDEDEYEMESPNITDTMKFFLYVLESLPSPTLTCALTNGSIEVQCMIPEHYNSHRGLIMYSWDCPMEQCKRNSTSIYFKMENDLPQKIQCTLSNPLFNTTSSIILTTCIPSSGHSRHRGGGS

SEQ ID NO: 1330 - protein, 418 aa, Artificial Sequence
  source: /note="Description of Artificial Sequence: Synthetic polypeptide"
FSQQIYGVVYGNVTFHVPSNVPLKEVLWKKQKDKVAELENSEFRAFSSFKNRVYLDTVSGSLTIYNLTSSDEDEYEMESPNITDTMKFFLYVLESLPSPTLTCALTNGSIEVQCMIPEHYNSHRGLIMYSWDCPMEQCKRNSTSIYFKMENDLPQKIQCTLSNPLFNTTSSIILTTCIPSSGHSRHRGGGSDKTHTCPPCPAPELLGGPSVFLFPPKPKDTLMISRTPEVTCVVVDVSHEDPEVKFNWYVDGVEVHNAKTKPREEQYASTYRVVSVLTVLHQDWLNGKEYKCKVSNKALPAPIEKTISKAKGQPREPQVYTLPPCREEMTKNQVSLWCLVKGFYPSDIAVEWESNGQPENNYKTTPPVLDSDGSFFLYSKLTVDKSRWQQGNVFSCSVMHEALHNRYTQKSLSLSPGK

SEQ ID NO: 1331 - protein, 214 aa, Artificial Sequence
  source: /note="Description of Artificial Sequence: Synthetic polypeptide"
EIVMTQSPATLSLSPGERATLSCRASQDISKYLNWYQQKPGQAPRLLIYHTSRLHSGIPARFSGSGSGTDYTLTISSLQPEDFAVYFCQQGNTLPYTFGQGTKLEIKRTVAAPSVFIFPPSDEQLKSGTASVVCLLNNFYPREAKVQWKVDNALQSGNSQESVTEQDSKDSTYSLSSTLTLSKADYEKHKVYACEVTHQGLSSPVTKSFNRGEC

SEQ ID NO: 1332 - protein, 96 aa, Artificial Sequence
  source: /note="Description of Artificial Sequence: Synthetic polypeptide"
SQQIYGVVYGNVTFHCPSNVPLKEVLWKKQKDKVAELENSEFRAFSSFKNRVYLDTVSGSLTIYNLTSSDEDEYECESPNITDTMKFFLYVLESGS

SEQ ID NO: 1333 - protein, 323 aa, Artificial Sequence
  source: /note="Description of Artificial Sequence: Synthetic polypeptide"
SQQIYGVVYGNVTFHCPSNVPLKEVLWKKQKDKVAELENSEFRAFSSFKNRVYLDTVSGSLTIYNLTSSDEDEYECESPNITDTMKFFLYVLESGSDKTHTCPPCPAPELLGGPSVFLFPPKPKDTLMISRTPEVTCVVVDVSHEDPEVKFNWYVDGVEVHNAKTKPREEQYASTYRVVSVLTVLHQDWLNGKEYKCKVSNKALPAPIEKTISKAKGQPREPQVYTLPPCREEMTKNQVSLWCLVKGFYPSDIAVEWESNGQPENNYKTTPPVLDSDGSFFLYSKLTVDKSRWQQGNVFSCSVMHEALHNRYTQKSLSLSPGK

SEQ ID NO: 1334 - protein, 96 aa, Artificial Sequence
  source: /note="Description of Artificial Sequence: Synthetic polypeptide"
SQQIYGVVYGNVTFHVPSNVPLKECLWKKQKDKVAELENSEFRAFSSFKNRVYLDTVSCSLTIYNLTSSDEDEYEMESPNITDTMKFFLYVLESGS

SEQ ID NO: 1335 - protein, 323 aa, Artificial Sequence
  source: /note="Description of Artificial Sequence: Synthetic polypeptide"
SQQIYGVVYGNVTFHVPSNVPLKECLWKKQKDKVAELENSEFRAFSSFKNRVYLDTVSCSLTIYNLTSSDEDEYEMESPNITDTMKFFLYVLESGSDKTHTCPPCPAPELLGGPSVFLFPPKPKDTLMISRTPEVTCVVVDVSHEDPEVKFNWYVDGVEVHNAKTKPREEQYASTYRVVSVLTVLHQDWLNGKEYKCKVSNKALPAPIEKTISKAKGQPREPQVYTLPPCREEMTKNQVSLWCLVKGFYPSDIAVEWESNGQPENNYKTTPPVLDSDGSFFLYSKLTVDKSRWQQGNVFSCSVMHEALHNRYTQKSLSLSPGK

SEQ ID NO: 1336 - protein, 96 aa, Artificial Sequence
  source: /note="Description of Artificial Sequence: Synthetic polypeptide"
SQQIYGVVYGNVTFHCPSNVPLKEVLWKKQKDKVAELENSEFRAFSSFKNRVYLDTVSGSLTIYNLTSSDEDEYEMESPNITDTCKFFLYVLESGS

SEQ ID NO: 1337 - protein, 323 aa, Artificial Sequence
  source: /note="Description of Artificial Sequence: Synthetic polypeptide"
SQQIYGVVYGNVTFHCPSNVPLKEVLWKKQKDKVAELENSEFRAFSSFKNRVYLDTVSGSLTIYNLTSSDEDEYEMESPNITDTCKFFLYVLESGSDKTHTCPPCPAPELLGGPSVFLFPPKPKDTLMISRTPEVTCVVVDVSHEDPEVKFNWYVDGVEVHNAKTKPREEQYASTYRVVSVLTVLHQDWLNGKEYKCKVSNKALPAPIEKTISKAKGQPREPQVYTLPPCREEMTKNQVSLWCLVKGFYPSDIAVEWESNGQPENNYKTTPPVLDSDGSFFLYSKLTVDKSRWQQGNVFSCSVMHEALHNRYTQKSLSLSPGK

SEQ ID NO: 1338 - protein, 110 aa, Artificial Sequence
  source: /note="Description of Artificial Sequence: Synthetic polypeptide"
DIVLTQSPATLSLSPGERATLSCRASQFISSSYLSWYQQKPGQAPRLLIYGSSSRATGVPARFSGSGSGTDFTLTISSLEPEDFAVYYCQQLYSSPMTFGQGTKVEIKRT

1.-120. (canceled)

121. A combination comprising:
a) a CD19 binding antibody, or antigen-binding domain thereof, comprising
(i) CDR-H1, CDR-H2, and CDR-H3 having the amino acid sequences of SEQ ID NO:1, SEQ ID NO:2, and SEQ ID NO:3, and CDR-L1, CDR-L2, and CDR-L3 having the amino acid sequences of SEQ ID NO:14, SEQ ID NO:15, and SEQ ID NO:16;
(ii) CDR-H1, CDR-H2, and CDR-H3 having the amino acid sequences of SEQ ID NO:4, SEQ ID NO:5, and SEQ ID NO:6, and CDR-L1, CDR-L2, and CDR-L3 having the amino acid sequences of SEQ ID NO:17, SEQ ID NO:18, and SEQ ID NO:19;
(iii) CDR-H1, CDR-H2, and CDR-H3 having the amino acid sequences of SEQ ID NO:7, SEQ ID NO:8, and SEQ ID NO:9, and CDR-L1, CDR-L2, and CDR-L3 having the amino acid sequences of SEQ ID NO:20, SEQ ID NO:21, and SEQ ID NO:22;
(iv) CDR-H1, CDR-H2, and CDR-H3 having the amino acid sequences of SEQ ID NO:10, SEQ ID NO:11, and SEQ ID NO:12, and CDR-L1, CDR-L2, and CDR-L3 having the amino acid sequences of SEQ ID NO:23, SEQ ID NO:24, and SEQ ID NO:25
(v) CDR-H1, CDR-H2, and CDR-H3 having the amino acid sequences of SEQ ID NO:27, SEQ ID NO:28, and SEQ ID NO:29, and CDR-L1, CDR-L2, and CDR-L3 having the amino acid sequences of SEQ ID NO:40, SEQ ID NO:41, and SEQ ID NO:42;
(vi) CDR-H1, CDR-H2, and CDR-H3 having the amino acid sequences of SEQ ID NO:30, SEQ ID NO:31, and SEQ ID NO:32, and CDR-L1, CDR-L2, and CDR-L3 having the amino acid sequences of SEQ ID NO:43, SEQ ID NO:44, and SEQ ID NO:45;
(vii) CDR-H1, CDR-H2, and CDR-H3 having the amino acid sequences of SEQ ID NO:33, SEQ ID NO:34, and SEQ ID NO:35, and CDR-L1, CDR-L2, and CDR-L3 having the amino acid sequences of SEQ ID NO:46, SEQ ID NO:47, and SEQ ID NO:48; or
(viii) CDR-H1, CDR-H2, and CDR-H3 having the amino acid sequences of SEQ ID NO:36, SEQ ID NO:37, and SEQ ID NO:38, and CDR-L1, CDR-L2, and CDR-L3 having the amino acid sequences of SEQ ID NO:49, SEQ ID NO:50, and SEQ ID NO:51; and,
b) a BAFF receptor (BAFFR) binding antibody, or antigen-binding domain thereof, comprising the CDR sequences of CDR-H1, CDR-H2, CDR-H3 having the amino acid sequences of SEQ ID NO. 53, 54, 55 respectively, and CDR-L1, CDR-L2, and CDR-L3 having the amino acid sequences of SEQ ID NO. 56, 57 and 58 respectively.

122. The combination of claim 121, wherein the CD19 binding molecule comprises CDR-H1, CDR-H2, and CDR-H3 having the amino acid sequences of SEQ ID NO:4, SEQ ID NO:5, and SEQ ID NO:6, and CDR-L1, CDR-L2, and CDR-L3 having the amino acid sequences of SEQ ID NO:17, SEQ ID NO:18, and SEQ ID NO:19.

123. The combination of claim 121, wherein the CD19 binding molecule comprises CDR-H1, CDR-H2, and CDR-H3 having the amino acid sequences of SEQ ID NO:30, SEQ ID NO:31, and SEQ ID NO:32, and CDR-L1, CDR-L2, and CDR-L3 having the amino acid sequences of SEQ ID NO:43, SEQ ID NO:44, and SEQ ID NO:45.

124. The combination of claim 121, wherein the CD19 binding molecule comprises a VH having the amino acid sequence of SEQ ID NO:13 and/or a VL having the amino acid sequence of SEQ ID NO:26.

125. The combination of claim 121, wherein the CD19 binding molecule comprises a VH having the amino acid sequence of SEQ ID NO:39 and/or a VL having the amino acid sequence of SEQ ID NO:52.

126. The combination of claim 121, wherein the CD19 binding molecule is a multispecific binding molecule (MBM) comprising an antigen-binding module 1 (ABM1) that binds specifically to CD19, and an antigen-binding module 2 (ABM2) that binds specifically to CD3

127. The combination of claim 126, wherein ABM2 comprises the CDR sequences of VH CDR1, VH CDR2 and VH CDR3 of SEQ ID NO. 1287, 1290, 1292 respectively and VL CDR1, VL CDR2, VL CDR3 of SEQ ID NO. 1288, 1291 and 1293 respectively.

128. The combination of claim 127, wherein ABM2 comprises the heavy and light chain variable sequences of SEQ ID No 1279 and 1280 respectively

129. The combination of claim 126, wherein ABM2 comprises the scFv of SEQ ID NO. 1281.

130. The combination of claim 126, where the CD19 binding molecule is a bispecific binding molecule (BBM).

131. The combination of claim 126, wherein the CD19 binding molecule is a trispecific binding molecule (TBM) comprising an antigen-binding module 3 (ABM3) that binds specifically to (i) human CD2 or (ii) a tumor associated antigen (TAA).

132. The combination of claim 131, wherein ABM3 binds specifically to human CD2.

133. The combination of claim 132, wherein ABM3 is a CD58 moiety.

134. The combination of claim 133, wherein the CD58 moiety comprises the amino acid sequence of SEQ ID NO. 1315.

135. The combination of claim 126, wherein the CD19 binding molecule comprises a first variant Fc region and a second variant Fc region that together form an Fc heterodimer.

136. A combination comprising:
a) a BAFF receptor (BAFFR) binding molecule, which is an antibody or antigen-binding domain thereof and comprises the CDR sequences of CDR-H1, CDR-H2, CDR-H3 having the amino acid sequences of SEQ ID NO. 53, 54, 55 respectively, and CDR-L1, CDR-L2, and CDR-L3 having the amino acid sequences of SEQ ID NO. 56, 57 and 58 respectively, and
b) a CD19 binding molecule comprising:
(i) an antigen-binding module 1 (ABM1) that binds specifically to CD19 and comprises CDR-H1, CDR-H2, and CDR-H3 having the amino acid sequences of SEQ ID NO:4, SEQ ID NO:5, and SEQ ID NO:6, and CDR-L1, CDR-L2, and CDR-L3 having the amino acid sequences of SEQ ID NO:17, SEQ ID NO:18, and SEQ ID NO:19 and wherein ABM1 is a Fab;
(ii) an antigen-binding module 2 (ABM2) that binds specifically to CD3 and wherein ABM2 comprises the amino acid sequence of the scFv of SEQ ID NO. 1281
(iii) an antigen-binding module 3 (ABM3) that binds specifically to human CD2 and which comprises the amino acid sequence of SEQ ID NO. 1315 and
(iv) an Fc domain.

137. The combination of claim 136, wherein ABM1 comprises a VH having the amino acid sequence of SEQ ID NO:13 and a VL having the amino acid sequence of SEQ ID NO:26.

138. The combination of claim 136, wherein Fc binding domain of the CD19 binding molecule comprises a first variant Fc region and a second variant Fc region that together form an Fc heterodimer.

139. The combination of claim 138, wherein the first variant Fc region is a variant human IgG1 Fc region and the second variant Fc region is a variant human IgG1 Fc region, wherein the first and second variant Fc regions comprise L234A, L235A, and G237A (“LALAGA”) substitutions, L234A, L235A, S267K, and P329A (“LALASKPA”) substitutions, D265A, P329A, and S267K (“DAPASK”) substitutions, G237A, D265A, and P329A (“GADAPA”) substitutions, G237A, D265A, P329A, and S267K (“GADAPASK”) substitutions, L234A, L235A, and P329G (“LALAPG”) substitutions, or L234A, L235A, and P329A (“LALAPA”) substitutions, wherein the amino acid residues are numbered according to the EU numbering system.

140. The combination of claim 136, wherein the Fc domain of the CD19 binding molecule is a human IgG1 Fc domain which comprises:
(a) a first CH3 domain comprising the modification T366W; and
(b) a second CH3 domain that heterodimerizes with the first CH3 domain and comprises the modifications T366S, L368A and Y407V.

141. The combination of claim 136, wherein the Fc domain of the CD19 binding molecule is a human IgG1 Fc domain which comprises:
(a) a first CH3 domain comprising the modification S354C; and
(b) a second CH3 domain comprises the modification Y349C.

142. The combination of claim 136, wherein the CD19 binding molecule comprises a first half antibody comprising a) the antigen-binding module 1 (ABM1) that binds specifically to CD19; b) the antigen-binding module 2 (ABM2) that binds specifically to CD3 and d) the Fc region; and a second half antibody comprising c) the antigen-binding module 3 (ABM3) and d) an Fc region, wherein the Fc region in the first half antibody and the Fc region in the second half antibody form a Fc heterodimer.

143. A combination comprising:
a) a CD19 binding molecule comprising
(i) a first half antibody heavy chain whose amino acid sequence comprises the amino acid sequence of SEQ ID NO:63 and a Fc sequence;
(ii) a first half antibody light chain whose amino acid sequence comprises the amino acid sequence of SEQ ID NO:64;
(iii) a second half antibody whose amino acid sequence comprises the amino acid sequence of SEQ ID NO:65 and a Fc sequence; and,
b) a BAFF receptor (BAFFR) binding molecule, which is an antibody or antigen-binding domain thereof and comprises the CDR sequences of CDR-H1, CDR-H2, CDR-H3 having the amino acid sequences of SEQ ID NO. 53, 54, 55 respectively, and CDR-L1, CDR-L2, and CDR-L3 having the amino acid sequences of SEQ ID NO. 56, 57 and 58 respectively.

144. A combination comprising:
a) a CD19 binding molecule comprising
(i) a first polypeptide whose amino acid sequence comprises the amino acid sequence of SEQ ID NO:74;
(ii) a second polypeptide whose amino acid sequence comprises the amino acid sequence of SEQ ID NO:64;
(iii) a third polypeptide whose amino acid sequence comprises the amino acid sequence of SEQ ID NO:75 or SEQ ID NO:86; and,
b) a BAFF receptor (BAFFR) binding molecule, which is an antibody or antigen-binding domain thereof and comprises the CDR sequences of CDR-H1, CDR-H2, CDR-H3 having the amino acid sequences of SEQ ID NO. 53, 54, 55 respectively, and CDR-L1, CDR-L2, and CDR-L3 having the amino acid sequences of SEQ ID NO. 56, 57 and 58 respectively,

145. A combination comprising:
a) a CD19 binding molecule comprising
(i) a first polypeptide whose amino acid sequence comprises the amino acid sequence of SEQ ID NO:1127;
(ii) a second polypeptide whose amino acid sequence comprises the amino acid sequence of SEQ ID NO:1129;
(iii) a third polypeptide whose amino acid sequence comprises the amino acid sequence of SEQ ID NO:1110; and,
b) a BAFF receptor (BAFFR) binding molecule, which is an antibody or antigen-binding domain thereof and comprises the CDR sequences of CDR-H1, CDR-H2, CDR-H3 having the amino acid sequences of SEQ ID NO. 53, 54, 55 respectively, and CDR-L1, CDR-L2, and CDR-L3 having the amino acid sequences of SEQ ID NO. 56, 57 and 58 respectively.

146. The combination of claim 121, wherein the BAFFR binding antibody, or antigen-binding domain thereof, comprises a heavy chain variable region (VH) and a light chain variable region (VL) having the VH and VL sequences of. SEQ ID NO. 59 and 60 respectively.

147. The combination of claim 146, wherein the BAFFR binding antibody, or antigen-binding domain thereof, comprises a heavy chain sequence of SEQ ID NO: 61 and a light chain sequence of SEQ ID NO: 62 respectively.

148. The combination of claim 147, wherein the BAFFR binding antibody is ianalumab.

149. The combination of claim 121, comprising one or more additional agents.

150. The combination of claim 149, wherein the one or more additional agents comprise a corticosteroid.

151. A method of treating a subject having a B cell malignancy, comprising administering the combination of claim 1 to the subject.

152. The method of claim 151, wherein the method comprises administering the BAFF receptor (BAFFR) binding molecule to the subject one or more times prior to administering the CD19 binding molecule to the subject for the first time.

153. The method of claim 151, wherein the method comprises administering the BAFF receptor (BAFFR) binding molecule to the subject a single time prior to administering the CD19 binding molecule to the subject for the first time.

154. The method of claim 151, wherein the method comprises administering the BAFF receptor (BAFFR) binding molecule to the subject more than one time prior to administering the CD19 binding molecule to the subject for the first time.

155. The method of claim 151, wherein the method comprises administering simultaneously the BAFF receptor (BAFFR) binding molecule and the CD19 binding molecule to the subject.

156. The method of claim 151, wherein the disease or disorder is selected from the group consisting of diffuse large B-cell lymphoma (DLBCL), relapsed and/or refractory DLBCL, acute lymphoblastic leukemia (ALL), mantle cell lymphoma (MCL), and Burkitt's lymphoma.

157. The method of claim 151, wherein the method comprises administering the BAFF receptor (BAFFR) binding molecule prior to administering the CD19 binding molecule to the subject.
